(19) United States
(12) Patent Application Publication
(10) Pub. No.: US 2026/0004885 A1
(43) Pub. Date: Jan. 1, 2026

(54) BIOMARKERS FOR DETERMINING A CANCER DISEASE STATE, RESPONSE TO IMMUNO-ONCOLOGY, STAGES OF FIBROSIS IN NON-ALCOHOLIC STEATOHEPATITIS, OR APPLICATION OF AGE OR SEX RELATED BIOMARKER PANEL FOR QUALITY CONTROL

(71) Applicant: VENN BIOSCIENCES CORPORATION, South San Francisco,, CA (US)

(72) Inventors: Chirag DHAR, San Mateo, CA (US); Paul Oluwaseyi AIYETAN, Frederick, MD (US); Monil Dilip GANDHI, San Jose, CA (US); Alan Nicolas MITCHELL, Fresno, CA (US); Chad Eagle PICKERING, San Mateo, CA (US); Prasanna RAMACHANDRAN, Menlo Park, CA (US); Daniel SERIE, San Francisco, CA (US); Apoorva SRINIVASAN, San Francisco, CA (US); Gege XU, Redwood City, CA (US)

(21) Appl. No.: 18/844,541

(22) PCT Filed: Apr. 1, 2023
(86) PCT No.: PCT/US2023/065248

§ 371 Date: Sep. 6, 2024

Related U.S. Application Data
(60) Provisional application No. 63/326,689, filed on Apr. 1, 2022.
(60) Provisional application No. 63/327,305, filed on Apr. 4, 2022.
(60) Provisional application No. 63/333,861, filed on Apr. 22, 2022.
(60) Provisional application No. 63/338,225, filed on May 4, 2022.
(60) Provisional application No. 63/364,467, filed on May 10, 2022.
(60) Provisional application No. 63/356,458, filed on Jun. 28, 2022.
(60) Provisional application No. 63/392,812, filed on Jul. 27, 2022.
(60) Provisional application No. 63/376,053, filed on Sep. 16, 2022.
(60) Provisional application No. 63/377,841, filed on Sep. 30, 2022.
(60) Provisional application No. 63/377,850, filed on Sep. 30, 2022.
(60) Provisional application No. 63/485,876, filed on Feb. 17, 2023.
(60) Provisional application No. 63/489,712, filed on Mar. 10, 2023.
(60) Provisional application No. 63/491,241, filed on Mar. 20, 2023.

(51) Int. Cl. G16B 40/20; G16H 10/40; G16H 15/00; G16H 20/00; G16H 50/30

(52) U.S. Cl. CPC G16B 40/20; G16H 10/40; G16H 15/00; G16H 20/00; G16H 50/30

(57) ABSTRACT

Provided herein are methods, devices, and kits for identifying glycosylated polypeptide biomarkers and signatures for progression of a disease or a condition, such as cancer or NASH, or and response of the disease or condition to a treatment. Also provided herein are: i) methods of generating and analyzing glycosylated polypeptide biomarkers, ii) methods of validating a model using glycosylated polypeptides for predicting the disease or condition or for making treatment recommendation, iii) systems and methods for implementing QC of a cohort of samples by analyzing peptide structure data for each sample using a machine learning model to generate a predicted age and/or sex associated for each sample. The quality control issue may include an error of mislabeled samples or an error from sample preparation, or a systemic measurement or an instrument error.

### CROSS-REFERENCE TO RELATED APPLICATIONS

[0001] This application claims the priority benefit of U.S. Provisional Patent Application Ser. 63/326,689, filed Apr. 1, 2022, [Attorney Docket No. VENN.P0016US.P1/VENN-00033PR]; U.S. Provisional Patent Application Ser. No. 63/327,305, filed Apr. 4, 2022, [Attorney Docket No. 16653-30019.00/VENN-00034PR]; U.S. Provisional Patent Application Ser. No. 63/333,861, filed Apr. 22, 2022, [Attorney Docket No. VENN.P0017US.P1/VENN-00039PR]; U.S. Provisional Patent Application Ser. No. 63/338,225, filed May 4, 2022, [Attorney Docket No. 16653-30019.01/VENN-00034P1]; U.S. Provisional Patent Application Ser. No. 63/364,467, filed May 10, 2022, [Attorney Docket No. VENN.P0018US.P1/VENN-00038PR]; U.S. Provisional Patent Application Ser. No. 63/356,458, filed Jun. 28, 2022, [Attorney Docket No. 16653-30023.00/VENN-00045PR]; U.S. Provisional Patent Application Ser. No. 63/392,812, filed Jul. 27, 2022 [Attorney Docket No. 16653-30025.00/VENN-00049PR]; U.S. Provisional Patent Application Ser. No. 63/376,053, filed Sep. 16, 2022, [Attorney Docket No. VENN.P0026US.P1/VENN-00052PR]; U.S. Provisional Patent Application Ser. No. 63/377,841, filed Sep. 30, 2022 [Attorney Docket No. VENN.P0022US.P1/VENN-00054PR]; U.S. Provisional Patent Application Ser. No. 63/377,850, filed Sep. 30, 2022, [Attorney Docket No. VENN.P0021US.P1/VENN-00053PR]; U.S. Provisional Patent Application Ser. No. 63/485,876, filed Feb. 17, 2023, [Attorney Docket No. 16653-30023.01/VENN-00045P1]; U.S. Provisional Patent Application Ser. No. 63/489,712, filed Mar. 10, 2023 [Attorney Docket No. VENN.P0026US.P2/VENN-00052P1]; U.S. Provisional Patent Application Ser. No. 63/491,241, filed Mar. 20, 2023, [Attorney Docket No. 16653-30027.00/VENN-00055PR]; which are hereby all incorporated by reference herein in their entirety.

### FIELD

[0002] The present disclosure generally relates to methods and systems for diagnosing, characterizing, and/or treating breast cancer, pancreatic cancer, non small cell lung cancer (NSCLC), ovarian cancer, malignant melanoma, a state of a fatty liver disease (FLD) progression. More particularly, the present disclosure relates to analyzing quantification data for a set of peptide structures detected in a biological sample obtained from a subject for use in a diagnostic assessment of the subject's disease state (e.g., healthy, NASH, breast cancer, pancreatic cancer, NSCLC, ovarian cancer, and melanoma) and/or treating the subject. The present disclosure also generally relates to methods, compositions, and systems for analyzing peptide structures for quality control related to biological samples. More particularly, the present disclosure relates to analyzing quantification data for a set of age-related peptide structures and/or a set of sex-related peptide structures detected in biological samples obtained from subjects for use as a quality control procedure for one or more processes. The present disclosure also relates to analyzing quantification data for a set of peptide structures detected in a biological sample obtained from a subject for use in a diagnostic assessment of whether the subject is likely or not likely to benefit from immuno-oncology treatment for melanoma or NSCLC.

### BACKGROUND

[0003] Protein glycosylation and other post-translational modifications play vital roles in virtually all aspects of human physiology. Unsurprisingly, faulty or altered protein glycosylation often accompanies various disease states. The identification of aberrant glycosylation provides opportunities for early detection, intervention, and treatment of affected subjects. Current biomarker identification methods, such as those developed in the fields of proteomics and genomics, can be used to detect indicators of certain diseases, such as cancer, and to differentiate certain types of cancer from other, non-cancerous diseases. However, the use of glycoproteomic analyses has not previously been used to successfully identify disease processes. Further, glycoproteomic analyses has not previously been used to successfully identify a disease state relating to a disease progression.

[0004] Glycoprotein analysis is fraught with challenges on several levels. For example, a single glycan composition in a peptide can contain a large number of isomeric structures due to different glycosidic linkages, branching patterns, and/or multiple monosaccharides having the same mass. In addition, the presence of multiple glycans that share the same peptide backbone can lead to assay signals from various glycoforms, lowering their individual abundances compared to aglycosylated peptides. Accordingly, the development of algorithms that can identify glycan structures on peptide fragments remains elusive.

[0005] In light of the above, there is a need for improved analytical methods that involve site-specific analysis of glycoproteins to obtain information about protein glycosylation patterns, which can in turn provide quantitative information that can be used to identify disease processes. The present disclosure addresses this and other needs by combining site-specific glycoprotein analysis with machine learning and advanced mass spectrometry instrumentation to quantitatively analyze peptide structures that are indicative of specific disease states, including, but not limited to, medical conditions encompassed herein. For example, there is a need to use such analysis to diagnose, detect and/or treat pancreatic cancer (PC) or breast cancer (BC) or to predict a risk for BC.

[0006] In order to ensure correct sample analysis of a given set of glycopeptides, the steps in the process to produce and analyze the glycopeptides need to be accurate, including at least for enzymatic digestion of the glycoproteins, glycopeptide enrichment, and mass spectrometry characterization of the glycopeptides. Ideally, a multi-step process such as glycoprotein analysis should include a process to provide assurance that the method has not endured any faulty processing and/or human error.

[0007] Diagnosing and treating BC currently relies on ultrasound, mammogram, magnetic resonance imaging, and/or tissue biopsy. For example, the standard proteins evaluated using ELISA-based technology include CA 15.3, TRU-QUANT, BRCA1, BRCA2, HER2, and/or CA 27.29 markers. However, evaluations based on these markers may not provide the level of performance desired with respect to predicting or diagnosing BC or identifying a risk for BC. Further, currently available methods for diagnosing BC may be unable to make an early diagnosis of BC. Late diagnosis of BC in patients can lead to negative health outcomes.

[0008] An approach that is both non-invasive and includes a low false positive rate while maintaining a high level of accuracy is needed. Additionally, an approach enabling early diagnosis may help reduce negative health outcomes in patients with BC. Thus, it is desirable to have methods and systems capable of addressing one or more of the above-identified issues. Separately, accumulation of fatty deposits in the liver, in the absence of excessive alcohol consumption, is the hallmark of non-alcoholic fatty liver diseases (NAFLD). NAFLD progresses through various stages of fat accumulation from simple steatosis (NAFL) to steatosis and weak inflammation with or without fibrosis, a condition termed non-alcoholic steatohepatitis (NASH), which, in turn, may progress to the development of liver cirrhosis. Currently, the best method for diagnosis of NASH is liver biopsy, which is still invasive and fraught with inter-operator variability. Current diagnostic techniques do not have the accuracy necessary to definitively predict the stage of FLD (e.g., whether a patient just has fat accumulation or NASH). In the present disclosure, the use of circulating serum glycoproteins circulating in blood were utilized to identify a panel of potential prognostic markers that may aid in predicting NASH and stage of liver fibrosis. Knowing a NASH stage of a patient with a high degree of accuracy would allow medical practitioners to customize treatment for individual patients and achieve better outcomes. Thus, it may be desirable to have methods and systems capable of distinguishing between these and healthy states.

[0009] Diagnosing and treating PC currently relies on protein assays evaluated using enzyme-linked immunosorbent assay (ELISA)-based technology. For example, the standard proteins evaluated using ELISA-based technology include the CA 19-9 and CEA proteins. However, evaluations based on these proteins may not provide the level of performance desired with respect to predicting or diagnosing PC. Further, currently available methods for diagnosing PC may be unable to make an early diagnosis of PC. Late diagnosis of PC in patients can lead to negative health outcomes.

[0010] An approach that is both non-invasive and includes a low false positive rate while maintaining a high level of accuracy is needed. Additionally, an approach enabling early diagnosis may help reduce negative health outcomes in patients with PC. Thus, it may be desirable to have methods and systems capable of addressing one or more of the above-identified issues.

[0011] Lung cancer is the most common cause of cancer death worldwide, with an estimated 1.6 million deaths each year. For lung cancer cases in the U.S., more than 80% are attributable to tobacco smoking. Despite being a preventable disease, lung cancer remains one of the most common and lethal cancers globally due to treatment challenges and limited effective therapeutic options.

[0012] Most lung cancer patients (about 85%) are diagnosed with non-small cell lung cancer (NSCLC). Diagnosis is usually confirmed with various imaging techniques (e.g., chest x-ray, CT scan) and fluid analyses (e.g., sputum cytology, thoracentesis). If lung cancer is suspected, a biopsy is collected for morphological and molecular sample analysis. Additional diagnostic options are available including an endoscopic ultrasound, bronchoscopy, blood testing, and immunohistochemistry, each having contextual advantages. Early detection and diagnosis of NSCLC are key for effective treatment, yet early-stage symptoms are often missed or mistaken for other illnesses (e.g., pneumonia or a partially collapsed lung). Consequently, the patient may only notice symptoms when the cancer has metastasized regionally in the lungs or across the body, wherein the 5-year survival rate drops substantially, to less than 10%.

[0013] In view of the current treatment options, NSCLC is not considered a curable disease once it progresses to stage III (e.g., larger tumor, potential for metastasis). Common treatments for NSCLC include surgery, for healthy individuals, wherein the cancer is physically removed by removing part of the lung (e.g., lobectomy) or removing the whole lung (e.g., pneumonectomy). Platinum-based therapies are common chemotherapy options, wherein platinum-coordination compounds, such as cisplatin (CDDP) and carboplatin (CBDCA are administered in combination with other cancer therapeutics. More recently, immunotherapies and patient-specific therapies have been used to improve treatment for specific NSCLC patient subgroups, but platinum-based therapies remain a therapeutic cornerstone for NSCLC treatment.

[0014] These NSCLC therapies can slow cancer progression, but early diagnosis is key for patient treatment and overall survival. Given the global burden and life-threatening consequences of delayed NSCLC detection, early and unambiguous diagnosis and effective treatment strategies are imperative. Under certain circumstances, the diagnosis of NSCLC using a blood sample may be easier to do than performing a diagnostic test that uses a biopsy sample obtained from a lung.

[0015] In light of the above, there is a need for improved analytical methods that involve site-specific analysis of glycoproteins to obtain information about protein glycosylation patterns, which can in turn provide quantitative information that can be used to identify disease states. For example, there is a need to use such analysis to diagnose and/or treat ovarian cancer.

[0016] Epithelial ovarian cancer (EOC) is currently the second-most common gynecologic malignancy, the leading cause of death from gynecological cancer, and the fourth-leading cause of cancer-related death in women in the United States. Although EOC can be treated effectively with surgery and adjuvant therapies, only about 15-20% of women are diagnosed at early-stage when 5-year survival is greater than 90%. Instead, the majority of EOC cases are diagnosed at late-stage (stage III or IV), with 5-year survival rates between about 15% and 40%. Diagnosing early-stage EOC is impeded by initial clinical signs and symptoms that are generally nonspecific and commonly missed such as, for example, pelvic pain, urinary urgency/frequency, abdominal bloating, early satiety, loss of appetite, and weight loss.

[0017] In addition to late diagnosis and consequent under-treatment of serious disease, benign disease is oftentimes unnecessarily over-treated due to the lack of diagnostic tools to determine the nature of pelvic masses. For example, while over 90% of women presenting with a pelvic mass may ultimately undergo surgery, only about 20% are found to have malignant disease.

[0018] Thus, an approach that is non-invasive, accurate, and reliable and that enables early diagnosis is needed. An approach enabling early diagnosis may help reduce negative health outcomes in patients with ovarian cancer, reduce the under-treatment of ovarian cancer, and/or reduce the over-treatment of benign disease. In addition, more strategic treatments can be provided with a diagnostic test that can assess whether a subject has early stage or late stage ovarian cancer. Thus, it may be desirable to have methods and systems capable of addressing one or more of the above-identified issues.

[0019] In certain situations, there is a desire for improved analytical methods that involve site-specific analysis of glycoproteins to obtain information about protein glycosylation patterns, which can in turn provide quantitative information that can be used to manage the treatment of a subject diagnosed with a particular disease or condition such as melanoma or NSCLC. Thus, it may be desirable to have methods and systems capable of addressing one or more of the above-identified issues.

[0020] One cancer whose treatment would benefit from the contemplated glycoproteomic analysis is non-small-cell lung cancer (NSCLC). Subjects diagnosed with NSCLC may undergo pembrolizumab therapy, but objective response rates for pembrolizumab therapy are low in NSCLC patients. Subjects should avoid unnecessary exposure and toxicities if they will not respond to pembrolizumab therapy. Hence, there is a need for determination of likely response to pembrolizumab therapy for NSCLC patients.

### SUMMARY

[0021] In various embodiments, there is a method of classifying a biological sample with respect to a plurality of states associated with fatty liver disease (FLD) progression, the method comprising: receiving peptide structure data corresponding to a set of glycoproteins and/or non-glycosylated peptides in the biological sample obtained from a subject; inputting quantification data identified from the peptide structure data for a set of peptide structures into at least one machine learning model, wherein the set of peptide structures includes at least one peptide structure identified from a plurality of peptide structures in Table 1A; analyzing the quantification data using the machine learning model to generate a disease indicator; and generating a diagnosis output based on the disease indicator that classifies the biological sample as evidencing a corresponding state of the plurality of states associated with the FLD progression.

[0022] In various embodiments, there is a method of training a model to diagnose a subject with one of a plurality of states associated with non-alcoholic steatohepatitis (NASH) progression, the method may comprise receiving quantification data for a panel of peptide structures for a plurality of subjects, each diagnosed with one of the plurality of states associated with NASH progression, wherein the quantification data comprises a plurality of peptide structure profiles for the plurality of subjects and identifies a corresponding state of the plurality of states for each peptide structure profile of the plurality of peptide structure profiles; and training a machine learning model using the quantification data to determine which state of the plurality of states a biological sample (such as at least one of blood, serum, or plasma) from the subject corresponds.

[0023] In various embodiments, there are methods of training a model to detect the presence of non-alcoholic steatohepatitis (NASH) in a subject, the methods comprising receiving quantification data for a panel of peptide structures for a plurality of subjects, each assessed for the presence of NASH, wherein the quantification data comprises a plurality of peptide structure profiles for the plurality of subjects and identifies the presence or absence of NASH for each peptide structure profile of the plurality of peptide structure profiles; and training a machine learning model using the quantification data to determine the presence or absence of NASH in a biological sample (including blood, plasma, or serum) corresponding to the subject.

[0024] In various embodiments, there are methods of detecting a presence of one of a plurality of states associated with fatty liver disease (FLD) progression in a biological sample, the method comprising receiving peptide structure data corresponding to a set of glycoproteins and/or non-glycosylated peptides in the biological sample obtained from a subject; analyzing the peptide structure data using at least one supervised machine learning model to generate a disease indicator based on at least 2 peptide structures selected from a group of peptide structures identified in Table 1A; and detecting the presence of a corresponding state of the plurality of states associated with the FLD progression in response to a determination that the disease indicator falls within a selected range associated with the corresponding state.

[0025] In various embodiments, methods of classifying a biological sample as corresponding to one of a plurality of states associated with fatty liver disease (FLD) progression are provided, the methods comprising training at least one supervised machine learning model using training data, wherein the training data comprises a plurality of peptide structure profiles for a plurality of training subjects and identifies a state of the plurality of states for each peptide structure profile of the plurality of peptide structure profiles; receiving peptide structure data corresponding to a set of non-glycosylated peptides and/or glycopeptides in the biological sample obtained from a subject; inputting quantification data identified from the peptide structure data for a set of peptide structures into the supervised machine learning model that has been trained, wherein the set of peptide structures includes at least one peptide structure identified in Table 1A; analyzing the quantification data using the supervised machine learning model to generate a score; determining that the score falls within a selected range associated with a corresponding state of the plurality of states associated with the FLD progression; and generating a diagnosis output that indicates that the biological sample evidences the corresponding state, wherein the plurality of states includes a non-alcoholic steatohepatitis (NASH) state or a non-NASH state.

[0026] In various embodiments, there are methods of treating a non-alcoholic steatohepatitis (NASH) disorder in a patient to at least one of reduce, stall, or reverse a progression of the NASH disorder into a later stage of NASH, the method comprising: receiving a biological sample from the patient; determining a quantity of at least 2 peptide structures identified in Table 1A in the biological sample using a multiple reaction monitoring mass spectrometry (MRM-MS) system; analyzing the quantity of each peptide structure using at least one machine learning model to generate a disease indicator; generating a diagnosis output based on the disease indicator that classifies the biological sample as evidencing that the patient has the NASH disorder; and administering a therapeutically effective amount of the treatment for NASH.

[0027] In various embodiments, there is a method of designing a treatment for a subject diagnosed with a state associated with a fatty liver disease (FLD) progression, the method comprising: designing a therapeutic for treating the subject in response to determining that a biological sample obtained from the subject evidences the state using part or all of any method encompassed herein.

[0028] In various embodiments, there is a method of planning a treatment for a subject diagnosed with a state associated with a fatty liver disease (FLD) progression, the method comprising: generating a treatment plan for treating the subject in response to determining that a biological sample obtained from the subject evidences the state using part or all of any method encompassed herein.

[0029] In various embodiments, a method of treating a subject diagnosed with a state associated with a fatty liver disease (FLD) progression is provided, the method comprising: administering to the subject a therapeutic to treat the subject based on determining that a biological sample obtained from the subject evidences the state using part or all of any method encompassed herein.

[0030] In various embodiments, there is a method of treating a subject diagnosed with a state associated with a fatty liver disease (FLD) progression, the method comprising: selecting a therapeutic to treat the subject based on determining that the subject is responsive to the therapeutic using any method encompassed herein.

[0031] In various embodiments, there is a method for analyzing a set of peptide structures in a sample from a patient, the method comprising (a) obtaining the sample from the patient; (b) preparing the sample to form a prepared sample comprising the set of peptide structures; (c) inputting the prepared sample into a mass spectrometry system using a liquid chromatography system; (d) detecting a set of product ions associated with each peptide structure of the set of peptide structures using the mass spectrometry system, wherein the set of peptide structures includes at least one peptide structure selected from peptide structures identified in Table 4; wherein the set of peptide structures includes a peptide structure that is characterized as having: (i) a precursor ion with a mass-charge (m/z) ratio within ±1.5 of the m/z ratio listed for the precursor ion in Table 4 as corresponding to the peptide structure; and (ii) a product ion having an m/z ratio within ±1.0 of the m/z ratio listed for a first product ion in Table 4 as corresponding to the peptide structure; and (e) generating quantification data for the set of product ions using the mass spectrometry system.

[0032] In various embodiments, there is a composition comprising at least one of the peptide structures identified in Table 1A. In various embodiments, there are compositions that may comprise a peptide structure or a product ion, wherein: the peptide structure or product ion comprises an amino acid sequence having at least 90% sequence identity to any one of SEQ ID NOS: 1-23, corresponding to peptide structures in Table 1A; and the product ion is selected as one from a group consisting of product ions identified in Table 4 including product ions falling within an identified m/z range. In various embodiments, there is a composition comprising a glycopeptide structure selected as one from a group consisting of peptide structures identified in Table 4, wherein the glycopeptide structure comprises: an amino acid peptide sequence identified in Table 5A as corresponding to the glycopeptide structure; and a glycan structure identified in Table 1A as corresponding to the glycopeptide structure in which the glycan structure is linked to a residue of the amino acid peptide sequence at a corresponding position identified in Table 1A, wherein the glycan structure has a glycan composition. In various embodiments, there is a composition comprising a peptide structure selected as one from a plurality of peptide structures identified in Table 1, wherein: the peptide structure has a monoisotopic mass identified as corresponding to the peptide structure in Table 4; and the peptide structure comprises the amino acid sequence of SEQ ID NOs: 1-23 identified in Table 1A as corresponding to the peptide structure.

[0033] In various embodiments, kits may comprise at least one agent for quantifying at least one peptide structure identified in Table 1A to carry out part or all of the methods of any one of claims 1-95. In some embodiments, kits may comprise at least one of a glycopeptide standard, a buffer, or a set of peptide sequences to carry out part or all of the method of any one of claims 1-95, a peptide sequence of the set of peptide sequences identified by a corresponding one of SEQ ID NOS: 1-23, defined in Table 1A.

[0034] In various embodiments, systems are provided that may comprise one or more data processors; and a non-transitory computer readable storage medium containing instructions which, when executed on the one or more data processors, cause the one or more data processors to perform part or all of any method encompassed herein. In some embodiments, there are computer-program products tangibly embodied in a non-transitory machine-readable storage medium, including instructions configured to cause one or more data processors to perform part or all of any method encompassed herein.

[0035] In various embodiments, there is a method of classifying a sample from an individual suspected of having, known to have, or at risk for having non-alcoholic steatohepatitis (NASH), comprising the step of measuring from the sample for one or more glycopeptides and/or non-glycosylated peptides in Table 1A.

[0036] Various embodiments of the disclosure include methods of predicting a stage of fibrosis in non-alcoholic steatohepatitis (NASH) in an individual, comprising the step of measuring from a sample (including blood, serum, or plasma) from the individual for one or more glycopeptides and/or non-glycosylated peptides from Table 1A.

[0037] In various embodiments, a computer-program product tangibly embodied in a non-transitory machine-readable storage medium is provided, including instructions configured to cause one or more data processors to perform part or all of any one or more of the methods disclosed herein.

[0038] In one aspect, a method for diagnosing a subject or measuring a risk prediction or early detection with respect to a breast cancer (BC) disease state is described in accordance with various embodiments. In various embodiments, the method includes receiving peptide structure data (which may also be referred to as quantification data) corresponding to a biological sample obtained from the subject. In particular embodiments, minimally invasive liquid biopsies, including at least blood-based biopsies, are useful to provide information for a BC disease state. In various embodiments, the method includes analyzing the peptide structure data using at least one supervised machine learning model to generate a disease indicator that indicates whether the biological sample evidences a BC disease state based on at least 1 peptide structure selected from a group of peptide structures identified in Table 9. In various embodiments, the group of peptide structures in Table 9 is associated with the BC disease state. In various embodiments, the group of peptide structures is listed in Table 9 with respect to relative significance to the disease indicator. In various embodiments, the method includes generating a diagnosis output based on the disease indicator.

[0039] In one aspect, a method of training a model to diagnose a subject with respect to a breast cancer (BC) disease state is described in accordance with various embodiments. In various embodiments, the method includes receiving quantification data (which may also be referred to as peptide structure data) for a panel of peptide structures for a plurality of subjects. In various embodiments, the plurality of subjects includes a first portion diagnosed with a negative diagnosis of a BC disease state and a second portion diagnosed with a positive diagnosis of the BC disease state. In various embodiments, the quantification data comprises a plurality of peptide structure profiles for the plurality of subjects. In various embodiments, the method includes training a machine learning model using the quantification data to diagnose a biological sample with respect to the BC disease state using a group of peptide structures associated with the BC disease state. In various embodiments, the group of peptide structures is identified in Table 9. In various embodiments, the group of peptide structures is listed in Table 9 with respect to relative significance to diagnosing the biological sample.

[0040] In one aspect, a method of monitoring a subject for a breast cancer (BC) disease state is described in accordance with various embodiments. In various embodiments, the method includes receiving first peptide structure data for a first biological sample obtained from a subject at a first timepoint. In various embodiments, the method includes analyzing the first peptide structure data using a supervised machine learning model to generate a first disease indicator based on at least 1 peptide structure selected from a group of peptide structures identified in Table 9, wherein the group of peptide structures in Table 9 comprises a group of peptide structures associated with a BC disease state. In various embodiments, the method includes receiving second peptide structure data of a second biological sample obtained from the subject at a second timepoint. In various embodiments, the method includes analyzing the second peptide structure data using the supervised machine learning model to generate a second disease indicator based on the at least 1 peptide structure selected from the group of peptide structures identified in Table 9. In various embodiments, the method includes generating a diagnosis output based on the first disease indicator and the second disease indicator.

[0041] In one aspect, a composition comprising at least one of peptide structures PS-30 through PS-47 identified in Table 9 is described according to various embodiments.

[0042] In one aspect, a composition comprising at least one of peptide structures PS-33, PS-42, PS-44, PS-30, PS-47, PS-43, or PS-37 identified in Table 10A is described according to various embodiments.

[0043] In one aspect, a composition comprising at least one of peptide structures PS-42, PS-44, PS-41, PS-43, PS-47, PS-37, PS-30, or PS-45 identified in Table 10B is described according to various embodiments.

[0044] In one aspect, a composition comprising a peptide structure or a product ion is described according to various embodiments. In various embodiments, the peptide structure or the product ion comprises an amino acid sequence having at least 90% sequence identity to any one of SEQ ID NOS: 46-62, corresponding to peptide structures PS-30 through PS-47 in Table 9. In various embodiments, the product ion is selected as one from a group consisting of product ions identified in Table 11 including product ions falling within an identified m/z range.

[0045] In one aspect, a composition comprising a glycopeptide structure selected as one from a group consisting of peptide structures PS-30 through PS-47 identified in Table 9 according to various embodiments. In various embodiments, the glycopeptide structure comprises an amino acid peptide sequence identified in Table 12 as corresponding to the glycopeptide structure and a glycan structure identified in Table 14 as corresponding to the glycopeptide structure in which the glycan structure is linked to a residue of the amino acid peptide sequence at a corresponding position identified in Table 9. In various embodiments, the glycan structure has a glycan composition.

[0046] In one aspect, a composition comprising a peptide structure selected as one from a plurality of peptide structures identified in Table 9 according to various embodiments. In various embodiments, the peptide structure has a monoisotopic mass identified as corresponding to the peptide structure in Table 9. In various embodiments, the peptide structure comprises the amino acid sequence of SEQ ID NOs: 46-62 identified in Table 9 as corresponding to the peptide structure.

[0047] In one aspect, a composition comprising a peptide structure or a product ion is described according to various embodiments. In various embodiments, the peptide structure or the product ion comprises an amino acid sequence having at least 90% sequence identity to any one of SEQ ID NOS: 46-62. In various embodiments, the product ion is selected as one from a group consisting of product ions identified in Table 11 including product ions falling within an identified m/z range.

[0048] In one aspect, a composition comprising a glycopeptide structure selected as one from a group consisting of peptide structures PS-30 through PS-47 identified in Table 9 is described according to various embodiments. In various embodiments, the glycopeptide structure comprises an amino acid peptide sequence identified in Table 12 as corresponding to the glycopeptide structure. In various embodiments, a glycan structure identified in Table 14 as corresponding to the glycopeptide structure in which the glycan structure is linked to a residue of the amino acid peptide sequence at a corresponding position identified in Table 9. In various embodiments, the glycan structure has a glycan composition.

[0049] In one aspect, a composition comprising a peptide structure selected as one of PS-30 through PS-47 peptide structures identified in Table 9 is described according to various embodiments. In various embodiments, the peptide structure has a monoisotopic mass identified as corresponding to the peptide structure in Table 9. In various embodiments, the peptide structure comprises the amino acid sequence of SEQ ID NOS: 46-62 identified in Table 9 as corresponding to the peptide structure.

[0050] In one aspect, a kit comprising at least one agent for quantifying at least one peptide structure identified in Table 9 to carry out part or all of any one or more of the methods described herein.

[0051] In one aspect, a kit comprising at least one agent for quantifying at least one peptide structure identified in Table 10A or 10B to carry out part or all of any one or more of the methods described herein.

[0052] In one aspect, a kit comprising at least one of a glycopeptide standard, a buffer, or a set of peptide sequences to carry out part or all of any one or more of the methods described herein, a peptide sequence of the set of peptide sequences identified by a corresponding one of SEQ ID NOS: 46-62, defined in Table 9 is described according to various embodiments.

[0053] In one aspect, a system is described according to various embodiments. In various embodiments, the system comprises one or more data processors and a non-transitory computer readable storage medium containing instructions which, when executed on the one or more data processors, cause the one or more data processors to perform part or all of any one or more of the methods described herein.

[0054] In one aspect, a computer-program product tangibly embodied in a non-transitory machine-readable storage medium, including instructions configured to cause one or more data processors to perform part or all of any one or more of the methods described herein.

[0055] In one aspect, a method for diagnosing a subject with respect to a pancreatic cancer (PC) disease state is described in accordance with various embodiments. In various embodiments, the method includes receiving peptide structure data (which may also be referred to as quantification data) corresponding to a biological sample obtained from the subject. In various embodiments, the method includes analyzing the peptide structure data using at least one supervised machine learning model to generate a disease indicator that indicates whether the biological sample evidences a PC disease state based on at least 1 peptide structure selected from a group of peptide structures identified in Table 16. In various embodiments, the group of peptide structures in Table 16 is associated with the PC disease state. In various embodiments, the group of peptide structures is listed in Table 16 with respect to relative significance to the disease indicator. In various embodiments, the method includes generating a diagnosis output based on the disease indicator.

[0056] In one aspect, a method of training a model to diagnose a subject with respect to a pancreatic cancer (PC) disease state is described in accordance with various embodiments. In various embodiments, the method includes receiving quantification data (which may also be referred to as peptide structure data) for a panel of peptide structures for a plurality of subjects. In various embodiments, the plurality of subjects includes a first portion diagnosed with a negative diagnosis of a PC disease state and a second portion diagnosed with a positive diagnosis of the PC disease state. In various embodiments, the quantification data comprises a plurality of peptide structure profiles for the plurality of subjects. In various embodiments, the method includes training a machine learning model using the quantification data to diagnose a biological sample with respect to the PC disease state using a group of peptide structures associated with the PC disease state. In various embodiments, the group of peptide structures is identified in Table 16. In various embodiments, the group of peptide structures is listed in Table 16 with respect to relative significance to diagnosing the biological sample.

[0057] In one aspect, a method of monitoring a subject for a pancreatic cancer (PC) disease state is described in accordance with various embodiments. In various embodiments, the method includes receiving first peptide structure data for a first biological sample obtained from a subject at a first timepoint. In various embodiments, the method includes analyzing the first peptide structure data using a supervised machine learning model to generate a first disease indicator based on at least 1 peptide structure selected from a group of peptide structures identified in Table 16, wherein the group of peptide structures in Table 16 comprises a group of peptide structures associated with a PC disease state. In various embodiments, the method includes receiving second peptide structure data of a second biological sample obtained from the subject at a second timepoint. In various embodiments, the method includes analyzing the second peptide structure data using the supervised machine learning model to generate a second disease indicator based on the at least 1 peptide structure selected from the group of peptide structures identified in Table 16. In various embodiments, the method includes generating a diagnosis output based on the first disease indicator and the second disease indicator.

[0058] In one aspect, a composition comprising at least one of peptide structures PS-48 through PS-102 identified in Table 16 is described according to various embodiments.

[0059] In one aspect, a composition comprising at least one of peptide structures PS-49, PS-50, PS-54, PS-61, PS-63, PS-64, PS-71, PS-79, PS-81, PS-84, PS-86, PS-87, PS-90, PS-91, PS-92, PS-94, PS-95, PS-96, PS-97, PS-98, PS-99, or PS-101 identified in Table 17A is described according to various embodiments.

[0060] In one aspect, a composition comprising at least one of peptide structures PS-48, PS-52, PS-57, PS-61, PS-62, PS-63, PS-64, PS-69, PS-71, PS-72, PS-73, PS-84, PS-86, PS-88, PS-91, PS-94, PS-96, PS-100, or PS-101 identified in Table 17B is described according to various embodiments.

[0061] In one aspect, a composition comprising at least one of peptide structures PS-48, PS-52, PS-61, PS-64, PS-66, PS-68, PS-69, PS-71, PS-72, PS-73, PS-86, PS-89, PS-91, PS-94, PS-96, PS-99, or PS-101 identified in Table 17C is described according to various embodiments.

[0062] In one aspect, a composition comprising a peptide structure or a product ion is described according to various embodiments. In various embodiments, the peptide structure or the product ion comprises an amino acid sequence having at least 90% sequence identity to any one of SEQ ID NOS: 77-119, corresponding to peptide structures PS-48 through PS-102 in Table 16. In various embodiments, the product ion is selected as one from a group consisting of product ions identified in Table 18 including product ions falling within an identified m/z range.

[0063] In one aspect, a composition comprising a glycopeptide structure selected as one from a group consisting of peptide structures PS-48 through PS-102 identified in Table 16 according to various embodiments. In various embodiments, the glycopeptide structure comprises an amino acid peptide sequence identified in Table 19 as corresponding to the glycopeptide structure and a glycan structure identified in Table 21 as corresponding to the glycopeptide structure in which the glycan structure is linked to a residue of the amino acid peptide sequence at a corresponding position identified in Table 16. In various embodiments, the glycan structure has a glycan composition.

[0064] In one aspect, a composition comprising a peptide structure selected as one from a plurality of peptide structures identified in Table 16 according to various embodiments. In various embodiments, the peptide structure has a monoisotopic mass identified as corresponding to the peptide structure in Table 16. In various embodiments, the peptide structure comprises the amino acid sequence of SEQ ID NOs: 77-119 identified in Table 16 as corresponding to the peptide structure.

[0065] In one aspect, a composition comprising a peptide structure or a product ion is described according to various embodiments. In various embodiments, the peptide structure or the product ion comprises an amino acid sequence having at least 90% sequence identity to any one of SEQ ID NOS: 77-119. In various embodiments, the product ion is selected as one from a group consisting of product ions identified in Table 18 including product ions falling within an identified m/z range.

[0066] In one aspect, a composition comprising a glycopeptide structure selected as one from a group consisting of peptide structures PS-48 through PS-102 identified in Table 16 is described according to various embodiments. In various embodiments, the glycopeptide structure comprises an amino acid peptide sequence identified in Table 19 as corresponding to the glycopeptide structure. In various embodiments, a glycan structure identified in Table 21 as corresponding to the glycopeptide structure in which the glycan structure is linked to a residue of the amino acid peptide sequence at a corresponding position identified in Table 16. In various embodiments, the glycan structure has a glycan composition.

[0067] In one aspect, a composition comprising a peptide structure selected as one of PS-48 through PS-102 peptide structures identified in Table 16 is described according to various embodiments. In various embodiments, the peptide structure has a monoisotopic mass identified as corresponding to the peptide structure in Table 16. In various embodiments, the peptide structure comprises the amino acid sequence of SEQ ID NOS: 77-119 identified in Table 16 as corresponding to the peptide structure.

[0068] In one aspect, a kit comprising at least one agent for quantifying at least one peptide structure identified in Table 16 to carry out part or all of any one or more of the methods described herein.

[0069] In one aspect, a kit comprising at least one agent for quantifying at least one peptide structure identified in Table 17A, 17B, or 17C to carry out part or all of any one or more of the methods described herein.

[0070] In one aspect, a kit comprising at least one of a glycopeptide standard, a buffer, or a set of peptide sequences to carry out part or all of any one or more of the methods described herein, a peptide sequence of the set of peptide sequences identified by a corresponding one of SEQ ID NOS: 77-119, defined in Table 16 is described according to various embodiments.

[0071] In one aspect, a system is described according to various embodiments. In various embodiments, the system comprises one or more data processors and a non-transitory computer readable storage medium containing instructions which, when executed on the one or more data processors, cause the one or more data processors to perform part or all of any one or more of the methods described herein.

[0072] In one aspect, a computer-program product tangibly embodied in a non-transitory machine-readable storage medium, including instructions configured to cause one or more data processors to perform part or all of any one or more of the methods described herein.

[0073] Embodiments of the disclosure include methods for quality control (QC) of samples, the method comprising: analyzing peptide structure data for each sample of a cohort using a model to generate a predicted age associated for each sample of the cohort, wherein each sample corresponds to a subject having an associated chronological age; and identifying a quality control issue associated with the chronological age for the cohort based on a correlation coefficient of the predicted age and the chronological age for each sample of the cohort. The peptide structure data may comprise a set of age-associated glycosylation biomarkers, and a set of corresponding signals associated with each of the age-associated glycosylation biomarkers, wherein the set of corresponding signals is proportional to an amount of each of the age-associated glycosylation biomarkers in the sample, wherein the model is based on the set of age-associated glycosylation biomarkers and the set of corresponding signals associated with each of the age-associated glycosylation biomarkers, and wherein the set of age-associated glycosylation biomarkers comprises at least one of the age-associated glycosylation biomarkers listed in Table 23; the method further comprising: generating the correlation coefficient based on the predicted age and the chronological age for each sample of the cohort. In some embodiments, identifying the quality control issue associated with the chronological age for the cohort is based on the correlation coefficient, wherein the correlation coefficient does not fall within a predetermined range of values. In some cases, the predetermined range of values ranges from about 0 to about 0.2. In some embodiments, the quality control issue includes an error of mislabeled samples, an error from sample preparation, a systemic measurement error, or an instrument error.

[0074] In various embodiments, methods of the disclosure comprise receiving the peptide structure data for each sample of the cohort from a mass spectrometer. In some embodiments, the correlation coefficient comprises a Pearson correlation coefficient where the predicted age is a continuous variable and the chronological age is another continuous variable. In specific embodiments, the Pearson correlation coefficient (r_{xy}) comprises an equation, the equation being

$${r}_{xy} = \frac{{\sum }_{i = 1}^{n} ( {x}_{i} - \overline{x} ) ( {y}_{i} - \overline{y} )}{\sqrt{{\sum }_{i = 1}^{n} {( {x}_{i} - \overline{x} )}^{2}} \sqrt{{\sum }_{i = 1}^{n} {( {y}_{i} - \overline{y} )}^{2}}}$$

$$where n = a number of the samples in the cohort ,$$

$$i = an index number for each of the samples ,$$

$${x}_{i} = a chronological age for sample i ,$$

$$\overline{x} = a mean chronological age$$

$${y}_{i} = a predicted age for sample i ,$$

$$\overline{y} = a mean predicted age .$$

[0075] In certain embodiments, the model comprises multiplying the corresponding signal associated with age-associated glycosylation biomarkers and a respective coefficient for each sample of the cohort to form a plurality of products; summing together the plurality of products to form a summation; and adding the summation and the intercept to form an output value, wherein the output value is proportional to the predicted age for the sample.

[0076] In some embodiments, the model comprises an equation, the equation being

$$O V = {\sum }_{i = 1}^{i = 20} [ ( {Signal}_{SEQ ID No : i} ) \times ( {Coefficient}_{SEQ ID No : i} ) ] + Intercept$$

$$where O V = an output value ,$$

$$i = an index number for each of the age - associated glycosylation biomarkers ,$$

$${Signal}_{SEQ ID No : i} = a corresponding signal associated with the age - associated glycosylation biomarker i , and$$

$${Coefficient}_{SEQ ID No : i} = a coefficient associated with the age - associated glycosylation biomarker i , wherein the output value is proportional to the predicted age for the sample .$$

[0077] Each sample of the cohort comes from a subject with a disease condition, the disease condition selected from the group consisting of non-small cell lung cancer, breast cancer, pancreatic cancer, colorectal cancer, and nonalcoholic steatohepatitis (NASH), in some embodiments. Each sample of the cohort may come from a subject that has either a disease condition or a healthy condition, the disease condition selected from the group consisting of non-small cell lung cancer, breast cancer, pancreatic cancer, colorectal cancer, and nonalcoholic steatohepatitis (NASH).

[0078] In particular embodiments, the at least one of the age-associated glycosylation biomarkers comprises a glycopeptide structure defined by a peptide sequence and a glycan structure linked to the peptide sequence at a linking site of the peptide sequence, as identified in Table 23, with the peptide sequence being one of SEQ ID NOS: 163-174 as defined in Tables 25A and 25B. The peptide structure data comprise at least one of a raw abundance, an adjusted raw abundance, a peptide concentration, a glycopeptide concentration, or a normalized concentration, in certain cases. In some cases, the peptide structure data comprise normalized concentration data, wherein the normalized concentration data is a function of at least one of peptide abundance data, corresponding internal standard abundance data, a spike-in concentration value, and a dilution factor. The peptide structure data may be generated using multiple reaction monitoring mass spectrometry (MRM-MS).

[0079] In particular embodiments, the method further comprises creating a sample from the biological sample; and preparing the sample using reduction, alkylation, and enzymatic digestion to form a prepared sample that includes a set of peptide structures. Any method may further comprise generating the peptide structure data from the prepared sample using multiple reaction monitoring mass spectrometry (MRM-MS), wherein each of the age-associated glycosylation biomarkers of the set comprises a precursor ion and at least one product ion in accordance with Tables 23 and 24. The set of age-associated glycosylation biomarkers comprises at least three, four, or five of the age-associated glycosylation biomarkers listed in Table 23.

[0080] Embodiments of the disclosure include methods of generating a model to predict an age of a patient, the method comprising receiving peptide structure data for each sample of a cohort, wherein each sample has a chronological age, wherein the peptide structure data for each sample of the cohort comprise a set of glycopeptide groups, wherein each glycopeptide of the glycopeptide group has a same peptide sequence, and wherein each glycopeptide of the glycopeptide group has a different attached glycan at a same specific amino acid residue; determining, via principal component analysis (PCA), one or more PCA features for each glycopeptide group of the set; performing linear regression with the PCA feature and the chronological age for each sample; and selecting a set of the one or more PCA features with statistically significant values below a threshold value. The statistically significant values for each of the PCA features may be an output of the performed linear regression. Each of the glycopeptide groups comprises one or more glycopeptides, the method further comprising training, via one or more processors, at least one machine learning model using the one or more glycopeptides for each glycopeptide group of the selected set of the one or more PCA features and the chronological age for each sample.

[0081] In some embodiments, a method may further comprise testing the at least one trained machine learning model using another cohort of samples to generate predicted age values and comparing the predicted age values with the chronological age values of the another cohort of samples to validate the at least one trained machine learning model. The trained machine learning model may comprise ElasticNet. Each sample of the cohort may come from a subject with a disease condition, the disease condition selected from the group consisting of non-small cell lung cancer, breast cancer, pancreatic cancer, colorectal cancer, and nonalcoholic steatohepatitis (NASH). Each sample of the cohort may come from a subject that has either a disease condition or a healthy condition, the disease condition selected from the group consisting of non-small cell lung cancer, breast cancer, pancreatic cancer, colorectal cancer, and nonalcoholic steatohepatitis (NASH).

[0082] Embodiments of the disclosure include methods of performing quality control for a group of subject samples, comprising assaying for, or measuring, from the group of subject samples for one or more age-related peptide structures identified in Table 23; and comparing the presence or quantity of said one or more age-related peptide structures from the group of subject samples to a reference set of one or more of the age-related peptide structures. The one or more age-related peptide structures in the reference set may be 1, 2, 3, 4, 5, 6, 7, 8, 9, 10, 11, 12, 13, 14, 15, 16, 17, 18, 19, or all 20 of the age-related peptide structures identified in Table 23. In specific embodiments, the subjects in the group comprise healthy subjects, diseased subjects, or both. The diseased subjects may have cancer or may be at an increased risk for having cancer compared to the general population. In some embodiments, the assaying or measuring step comprises mass spectrometry.

[0083] Embodiments of the disclosure include methods of measuring for one or more age-related peptide structures from one or more subject samples, wherein the chronological age of said subject(s) is known or unknown, comprising the step of assaying the one or more subject samples for one or more peptide structures in Table 23. Embodiments of the disclosure include methods of identifying or predicting the chronological age of a subject based on one or more samples therefrom, comprising the step of assaying for, or measuring, in the sample(s) for one or more age-related peptide structures identified in Table 23. In specific embodiments, the assaying or measuring is for 1, 2, 3, 4, 5, 6, 7, 8, 9, 10, 11, 12, 13, 14, 15, 16, 17, 18, 19, or all 20 age-related peptide structures of Table 23.

[0084] Embodiments of the disclosure include methods for quality control (QC) of samples, the method comprising analyzing peptide structure data for each sample of a cohort using a model to generate a predicted sex associated for each sample of the cohort, wherein each sample corresponds to a subject having an associated annotated sex; and identifying a quality control issue associated with the annotated sex for the cohort based on an accuracy score of the predicted sex and the annotated sex for each sample of the cohort. In specific embodiments, the peptide structure data comprises a set of sex-associated glycosylation biomarkers, and a set of corresponding signals associated with each of the sex-associated glycosylation biomarkers, wherein the set of corresponding signals is proportional to an amount of each of the sex-associated glycosylation biomarkers in the sample, wherein the model is based on the set of sex-associated glycosylation biomarkers and the set of corresponding signals associated with each of the sex-associated glycosylation biomarkers, and wherein the set of sex-associated glycosylation biomarkers comprises at least one of the sex-associated glycosylation biomarkers listed in Table 28; the method further comprising generating the accuracy score based on the predicted sex and the annotated sex for each sample of the cohort. In a specific embodiment, the identifying the quality control issue associated with the annotated sex for the cohort is based on the accuracy score, wherein the accuracy score is generated by determining a number of times the predicted sex is the same as that of the sex of each sample. The method may further comprise generating a sensitivity score based on the predicted sex and the annotated sex with each sample and/or generating a specificity score based on the predicted sex and the annotated sex with each sample. In specific embodiments, the quality control issue includes an error of mislabeled samples, an error from sample preparation, a systemic measurement error, and/or an instrument error. In specific cases, the method further comprises receiving the peptide structure data for each sample of the cohort from a mass spectrometer.

[0085] In specific embodiments, each sample of the cohort comes from a subject that has a disease condition, the disease condition selected from the group consisting of non-small cell lung cancer, breast cancer, pancreatic cancer, colorectal cancer, and nonalcoholic steatohepatitis (NASH). In specific embodiments, each sample of the cohort comes from a subject that has either a disease condition or a healthy condition, the disease condition selected from the group consisting of non-small cell lung cancer, breast cancer, pancreatic cancer, colorectal cancer, and nonalcoholic steatohepatitis (NASH).

[0086] In particular embodiments, the at least one of the sex-associated glycosylation biomarkers comprises a glycopeptide structure defined by a peptide sequence and a glycan structure linked to the peptide sequence at a linking site of the peptide sequence, as identified in Table 28, with the peptide sequence being one of SEQ ID NOS: 183-196 as defined in Table 30A and 30B. The peptide structure data may comprise at least one of a raw abundance, an adjusted raw abundance, a peptide concentration, a glycopeptide concentration, or a normalized concentration. The peptide structure data may comprise normalized concentration data, wherein the normalized concentration data is a function of at least one of peptide abundance data, corresponding internal standard abundance data, a spike-in concentration value, and a dilution factor. In specific embodiments, the peptide structure data are generated using multiple reaction monitoring mass spectrometry (MRM-MS). In some embodiments, the method may further comprise creating a sample from the biological sample; and preparing the sample using reduction, alkylation, and enzymatic digestion to form a prepared sample that includes a set of peptide structures. The method in some embodiments further comprises generating the peptide structure data from the prepared sample using multiple reaction monitoring mass spectrometry (MRM-MS). In some cases, the set of sex-associated glycosylation biomarkers comprises at least three, at least four, or at least five of the sex-associated glycosylation biomarkers listed in Table 28.

[0087] Embodiments of the disclosure include methods of generating a model to predict a sex of a patient, the method comprising receiving peptide structure data for each sample of a cohort, wherein each sample has an annotated sex, wherein the peptide structure data for each sample of the cohort comprise a set of glycopeptide groups, wherein each glycopeptide of the glycopeptide group has a same peptide sequence, and wherein each glycopeptide of the glycopeptide group has a different attached glycan at a same specific amino acid residue; determining, via principal component analysis (PCA), one or more PCA features for each glycopeptide group of the set; performing linear regression with the PCA feature and the annotated sex for each sample; and selecting a set of the one or more PCA features with statistically significant values below a threshold value. In some embodiments, the statistically significant values for each of the PCA features is an output of the performed linear regression. Each of the glycopeptide groups may comprise one or more glycopeptides, the method further comprising training, via one or more processors, at least one machine learning model using the one or more glycopeptides for each glycopeptide group of the selected set of the one or more PCA features and the annotated sex for each sample. In some embodiments, the method further comprises testing the at least one trained machine learning model using another cohort of samples to generate predicted sex values and comparing the predicted sex values with the annotated sex values of the another cohort of samples to validate the at least one trained machine learning model, which may comprise ElasticNet. In specific embodiments, each sample of the cohort has a disease condition, the disease condition selected from the group consisting of non-small cell lung cancer, breast cancer, pancreatic cancer, colorectal cancer, and nonalcoholic steatohepatitis (NASH). In some embodiments, each sample of the cohort has either a disease condition or a healthy condition, the disease condition selected from the group consisting of non-small cell lung cancer, breast cancer, pancreatic cancer, colorectal cancer, and nonalcoholic steatohepatitis (NASH).

[0088] Embodiments of the disclosure include methods of performing quality control for a group of subject samples, comprising: assaying for, or measuring, from the group of subject samples for one or more sex-related peptide structures identified in Table 28; and comparing the presence or quantity of said one or more sex-related peptide structures from the group of subject samples to a reference set of one or more of the sex-related peptide structures. In specific embodiments, the threshold number is 1, 2, 3, 4, 5, 6, 7, 8, 9, 10, 11, 12, 13, 14, 15, 16, 17, 18, 19, 20, 21, 22, 23, 24, 25, 26, 27, 28, 29, 30, 31, 32, 33, 34, 35, 36, 37, 38, 39, 40, 41, or 42 sex-related peptide structures. The subjects in the group may comprise healthy subjects, diseased subjects (subjects have cancer or are at an increased risk for having cancer compared to the general population), or both. The assaying or measuring step may comprise mass spectrometry.

[0089] Embodiments of the disclosure include methods of measuring for one or more sex-related peptide structures from one or more subject samples, wherein the sex of said subject(s) is known or unknown, comprising the step of assaying the one or more subject samples for one or more peptide structures in Table 28.

[0090] Embodiments of the disclosure include methods of identifying or predicting the sex of a subject based on one or more samples therefrom, comprising the step of assaying or measuring in the sample(s) for one or more sex-related peptide structures identified in Table 28. The assaying or measuring may be for 1, 2, 3, 4, 5, 6, 7, 8, 9, 10, 11, 12, 13, 14, 15, 16, 17, 18, 19, 20, 21, 22, 23, 24, 25, 26, 27, 28, 29, 30, 31, 32, 33, 34, 35, 36, 37, 38, 39, 40, 41, or all 42 sex-related peptide structures of Table 28.

[0091] In some embodiments, provided herein is a method of classifying a biological sample obtained from a subject with respect to a plurality of states associated with non-small cell lung cancer (NSCLC). In some embodiments, the method includes receiving peptide structure data corresponding to a set of proteins in the biological sample, inputting quantification data identified from the peptide structure data for a set of peptide structures into a machine-learning model trained to identify a disease indicator based on the quantification data. In some embodiments, the set of peptide structures includes at least one peptide structure identified from a plurality of peptide structures in Table 35. In some embodiments, the method further includes identifying, by the machine-learning model, the disease indicator; and classifying the biological sample with respect to a plurality of states associated with NSCLC based upon the identified disease indicator. In some embodiments, the at least one peptide structure comprises a glycopeptide. In some embodiments, the set of proteins comprises one or more glycoproteins.

[0092] Also provided herein is a method of detecting the presence of non-small cell lung cancer (NSCLC) in a subject. In some embodiments, the method includes receiving peptide structure data corresponding to a set of proteins in a biological sample obtained from a subject. In some embodiments, the peptide structure data includes at least one peptide structure from Table 35. In some embodiments, the method further includes inputting quantification data identified from the peptide structure data for a set of peptide structures into a machine-learning model trained to identify a disease indicator based on the quantification data, and detecting the presence of NSCLC in response to a determination that the identified disease indicator falls within a selected range associated with NSCLC. In some embodiments, the at least one peptide structure comprises a glycopeptide. In some embodiments, the set of proteins comprises one or more glycoproteins.

[0093] In some embodiments, the plurality of states includes at least one of an NSCLC state or a healthy state. In some embodiments, the machine-learning model includes a regularized regression model. In some embodiments, the regularized regression model includes a least absolute shrinkage and selection operator (LASSO) regression model.

[0094] In some embodiments, the quantification data for a peptide structure of the set of peptide structures includes at least one of an abundance, a relative abundance, a normalized abundance, or a differential abundance. In some embodiments, the quantification data for a peptide structure of the set of peptide structures includes at least one of a relative quantity, an adjusted quantity, a normalized quantity, a relative concentration, an adjusted concentration, or a normalized concentration.

[0095] In some embodiments, the quantification data is generated using a liquid chromatography-mass spectrometry (LC-MS) system. In some embodiments, the peptide structure data is generated using multiple reaction monitoring mass spectrometry (MRM-MS). In some embodiments, the machine-learning model was trained utilizing a portion of the quantification data corresponding to a set of peptide structures that is a subset of the panel of peptide structures to determine which state of the plurality of states the biological sample from the subject corresponds. In some embodiments, the biological sample comprises at least one of blood, serum, or plasma.

[0096] In some embodiments, the methods further include performing a differential expression analysis using the quantification data for the plurality of subjects.

[0097] Also provided herein is a method of treating non-small cell lung cancer (NSCLC) in a subject. In some embodiments, method includes receiving peptide structure data corresponding to a set of proteins in the biological sample obtained from a subject. In some embodiments, the peptide structure data comprises at least one peptide structure from Table 35. In some embodiments, the method further includes inputting quantification data for the at least one peptide structure into a machine-learning model trained to generate disease indicator for NSCLC based on the quantification data, identifying, by the machine-learning model, the disease indicator, and determining at least one of a plurality of treatment regimens to treat NSCLC based upon the disease indicator. In some embodiments, the method further includes administering a selected treatment regimen to the subject. In some embodiments, the set of proteins comprises one or more glycoproteins.

[0098] Also provided herein is a method of treating non-small cell lung cancer (NSCLC) in a subject. In some embodiments, method includes receiving peptide structure data corresponding to a set of proteins in the biological sample, inputting quantification data identified from the peptide structure data for a set of peptide structures into a machine-learning model trained to identify a disease indicator based on the quantification data. In some embodiments, the peptide structure data includes at least one peptide structure identified from a plurality of peptide structures in Table 35. In some embodiments, the method further includes identifying, by the machine-learning model, the disease indicator, determining a classification for NSCLC based upon the identified disease indicator, and determining at least one of a plurality of treatment regimens to treat NSCLC based upon the classification. In some embodiments, the method further includes administering a selected treatment regimen to the subject. In some embodiments, the set of proteins comprises one or more glycoproteins.

[0099] Also provided herein is a method of diagnosing an individual with non-small cell lung cancer (NSCLC). In some embodiments, the method includes detecting the presence or amount of at least one peptide structure structures from Table 35 or Table 40, inputting a quantification of the detected at least one peptide structure into a machine-learning model trained to generate a class label, determining if the class label is above or below a threshold for a classification, identifying a diagnostic classification for the individual based on whether the class label is above or below a threshold for the classification, and diagnosing the individual as having NSCLC based on the diagnostic classification.

[0100] In some embodiments, the quantification data is generated using a liquid chromatography-mass spectrometry (LC-MS) system. In some embodiments, the peptide structure data is generated using multiple reaction monitoring mass spectrometry (MRM-MS). In some embodiments, the amount of at least one peptide structure is none, or below a detection limit. In some embodiments, the NSCLC is one of early-stage or late-stage NSCLC. In some embodiments, the NSCLC is one of stage I NSCLC, stage II NSCLC, stage III NSCLC, or stage IV NSCLC. In some embodiments, the at least one peptide structure comprises three or more peptide structures identified in Table 35 or Table 40. In some embodiments, the at least one peptide structure comprises at least one peptide comprising the sequence set forth in any one of SEQ ID NOs: 224-296. In some embodiments, the individual is determined have a healthy state, wherein a healthy state comprises the absence of NSCLC.

[0101] In some embodiments, the methods further include assessing one or more risk factor or clinical indicators of NSCLC. In some embodiments, the methods further include generating a report that includes a diagnosis based on the corresponding state detected for the subject.

[0102] Also provided herein is a method of training a model to diagnose a subject with one of a plurality of states associated with non-small cell lung cancer (NSCLC). In some embodiments, the method includes receiving quantification data for a panel of peptide structures for a plurality of subjects diagnosed with the plurality of states associated with NSCLC, and training a machine-learning model to determine a state of the plurality of states a biological sample from the subject based on the quantification data.

[0103] In some embodiments, training the machine-learning model to determine the state of the plurality of states further includes training the machine-learning model to generate a class label for the state of the plurality of states. In some embodiments, training the machine-learning model to determine the state of the plurality of states comprises training and evaluating the machine-learning model based on one or more of: a first set of peptide structure coefficient from Table 39 for all stages of NSCLC; a second set of peptide structure coefficients from Table 39 for early-stage NSCLC; and a third set of peptide structure coefficients from Table 39 for late-stage NSCLC. In some embodiments, the first set of peptide structure coefficients comprise the amino acid sequence of SEQ ID NOs: 229, 231-234, 236, 239, 241, 244-245, 247-255. In some embodiments, the second set of peptide structure coefficients comprise the amino acid sequence of SEQ ID NOs: 224, 227, 233, 238, 240-242, 244, 247-248, 250-255. In some embodiments, the third set of peptide structure coefficients comprise the amino acid sequence of SEQ ID NOs: 225-226, 228-230, 233-237, 239, 241-244, 246, 254-257.

[0104] In some embodiments, the plurality of states comprises at least one of a NSCLC state or a healthy state. In some embodiments, the machine-learning model comprises a regularized regression model. In some embodiments, the regularized regression model comprises a least absolute shrinkage and selection operator (LASSO) regression model.

[0105] In some embodiments, at least one of the peptide structures comprises a glycopeptide.

[0106] In some embodiments, the at least one peptide structure comprises at least one, at least two, at least three, at least five, at least 10, at least 15, at least 20, or at least 25 different peptides comprising the sequence set forth in any one of SEQ ID NOs: 224-257.

[0107] In some embodiments, the at least one peptide structure comprises at least one, at least two, at least three, at least five, at least 10, at least 15, at least 20, or at least 25 different peptides comprising the sequence set forth in any one of SEQ ID NOs: 258-296.

[0108] In some embodiments, the at least one peptide structure comprises at least one, at least two, at least three, at least five, at least 10, or at least 15 different peptides comprising the sequence set forth in any one of SEQ ID NOs: 229, 231-234, 239, 241, 244-245, 247-255.

[0109] In some embodiments, the at least one peptide structure comprises at least one, at least two, at least three, at least five, at least 10, at least 15, at least 20, or at least 25 different peptides comprising the sequence set forth in any one of SEQ ID NOs: 224-257. In some embodiments, the at least one peptide structure comprises at least one, at least two, at least three, at least five, at least 10, at least 15, at least 20, or at least 25 different peptides comprising the sequence set forth in any one of SEQ ID NOs: 258-296. In some embodiments, the at least one peptide structure comprises at least one, at least two, at least three, at least five, at least 10, or at least 15 different peptides comprising the sequence set forth in any one of SEQ ID NOs: 229, 231-234, 239, 241, 244-245, 247-255.

[0110] In some embodiments, the at least one peptide structure comprises a peptide sequence and a glycan structure, wherein the glycan structure is attached to a linking site position in the peptide sequence in accordance with Table 35. In some embodiments, the glycan structure of the peptide sequence corresponds to a glycan structure GL number in accordance with Table 35, wherein the glycan structure comprises a symbol structure in accordance with the glycan structure GL number according to Table 35, Table 36A, and Table 36B. In some embodiments, the glycan structure of the peptide sequence corresponds to a glycan structure GL number in accordance with Table 35, wherein the glycan structure comprises a composition in accordance with the glycan structure GL number, Table 35, Table 36A, and Table 36B. In some embodiments, a rightmost N-acetylgalactosamine (open square) of the glycan structure in Table 36A is attached to a linking site position in the peptide sequence in accordance with Table 35. In some embodiments, a bottommost N-acetylglucosamine (dark square) of the glycan structure in Table 36B is attached to a linking site position in the peptide sequence in accordance with Table 35.

[0111] In some embodiments, provided herein is a composition comprising one or more peptide structures from Table 35. In some embodiments, the at least one peptide structure comprises a peptide sequence and a glycan structure, wherein the glycan structure is attached to a linking site position in the peptide sequence in accordance with Table 35. In some embodiments, the glycan structure of the peptide sequence corresponds to a glycan structure GL number in accordance with Table 35, wherein the glycan structure comprises a symbol structure in accordance with the glycan structure GL number according to Table 35, Table 36A, and Table 36B. In some embodiments, the glycan structure of the peptide sequence corresponds to a glycan structure GL number in accordance with Table 35, wherein the glycan structure comprises a composition in accordance with the glycan structure GL number, Table 35, Table 36A, and Table 36B. In some embodiments, a rightmost N-acetylgalactosamine (GalNAc) of the glycan structure in Table 36A is attached to a linking site position in the peptide sequence in accordance with Table 35. In some embodiments, a bottommost N-acetylglucosamine (GlcNAc) of the glycan structure in Table 36B is attached to a linking site position in the peptide sequence in accordance with Table 35.

[0112] In some embodiments, provided herein is a composition comprising one or more peptides comprising the sequence set forth in SEQ ID NOs: 224-296. In some embodiments, the one or more peptides comprise one or more glycopeptides.

[0113] In an embodiment, a method for diagnosing a subject with respect to an ovarian cancer disease state is described. The method includes receiving peptide structure data corresponding to a biological sample obtained from the subject. The peptide structure data can be analyzed using a supervised machine learning model to generate a disease indicator that indicates whether the biological sample evidences the ovarian cancer disease state of having early stage or late stage ovarian cancer based on at least one peptide structures selected from one of a group of peptide structures identified in Tables 43B, 43C, or 43D. A diagnosis output can be generated based on the disease indicator. The disease indicator can include a score.

[0114] The method of generating the diagnosis output can include determining that the score falls above a selected threshold and generating the diagnosis output based on the score falling above the selected threshold, wherein the diagnosis output includes a classification of late stage ovarian cancer disease state. The method of generating the diagnosis output can include determining that the score falls below a selected threshold and generating the diagnosis output based on the score falling below the selected threshold, wherein the diagnosis output includes a classification of early stage ovarian cancer disease state. The score may include a probability score and the selected threshold is 0.5. Alternatively, the selected threshold may fall within a range between 0.30 and 0.65. In an embodiment, the analyzing the peptide structure data can include analyzing the peptide structure data using a binary classification model. The peptide structure of the at least one peptide structures can include a glycopeptide structure defined by a peptide sequence and a glycan structure linked to the peptide sequence at a linking site of the peptide sequence, as identified in Table 43D, with the peptide sequence being one of SEQ ID NOS: 500-549 in Table 43D as defined in Table 45. The peptide structure of the at least one peptide structures can include a glycopeptide structure defined by a peptide sequence and a glycan structure linked to the peptide sequence at a linking site of the peptide sequence, as identified in Table 43B, with the peptide sequence being one of SEQ ID NOS: 310, 314, 429, 430, 434, 436, 439, 442, 451, 453, 457, 465, 466, 467, 468, 469, 470, 471, 472, 473, and 474 in Table 43B as defined in Table 45.

[0115] In another embodiment, the method can include training the supervised machine learning model using training data, wherein the training data comprises a plurality of peptide structure profiles for a plurality of subjects and a plurality of subject diagnoses for the plurality of subjects, wherein the plurality of subject diagnoses includes a diagnosis for any subject of the plurality of subjects determined to have early stage or late stage ovarian cancer.

[0116] In another embodiment, the method can include performing a differential expression analysis using initial training data to compare a first portion of the plurality of subjects diagnosed with the classification of early stage ovarian cancer disease state versus a second portion of the plurality of subjects diagnosed with the classification of late stage ovarian cancer disease state; identifying a training group of peptide structures based on the differential expression analysis for use as prognostic markers for the ovarian cancer disease state; and forming the training data based on the training group of peptide structures identified. The training of the supervised machine learning model can include reducing the training group of peptide structures to a final group of peptide structures identified in Tables 43B, 43C, or 43D.

[0117] In an embodiment, each peptide structure profile of the plurality of peptide structure profiles can include a feature selected from one of a relative abundance and a concentration for a corresponding peptide structure. The plurality of peptide structure profiles can include a first peptide structure profile with a relative abundance for a corresponding peptide structure and a second peptide structure profile with a concentration for the corresponding peptide structure. The supervised machine learning model can include a logistic regression model.

[0118] In an embodiment, the first group of peptide structures in Tables 43B, 43C, or 43D is used to distinguish between the ovarian cancer disease state being late stage or early stage. The quantification data for a peptide structure of the set of peptide structures can include at least one of an abundance, a relative abundance, a normalized abundance, a relative quantity, an adjusted quantity, a normalized quantity, a relative concentration, an adjusted concentration, or a normalized concentration.

[0119] In an embodiment, the peptide structure data can be generated using multiple reaction monitoring mass spectrometry (MRM-MS), wherein the using of the MRM-MS includes ionizing one or more glycopeptides to form ionized glycopeptides; filtering the ionized glycopeptides with a mass filter to form filtered glycopeptides; fragmenting the filtered glycopeptides in a collision chamber into product ions; and detecting the product ions.

[0120] In an embodiment, the method can include preparing a sample of the biological sample using reduction, alkylation, and enzymatic digestion to form a prepared sample that includes a set of peptide structures.

[0121] In an embodiment, the method of classifying early and late stage ovarian cancer can be implemented after the subject has already been diagnosed as having ovarian cancer. The subject can be initially diagnosed for having ovarian cancer using one or more biomarkers in Tables 41, 42, 43A, 43B, 43C, or 43D.

[0122] In an embodiment, the generating the diagnosis output can include generating a report identifying that the biological sample evidences the early stage or late stage ovarian cancer disease state.

[0123] In an embodiment, the generating a treatment output can be generated based on at least one of the diagnosis output or the disease indicator. The treatment output can include at least one of an identification of a treatment to treat the subject or a treatment plan. The treatment can include at least one of surgery, radiation therapy, a targeted drug therapy, chemotherapy, immunotherapy, hormone therapy, or neoadjuvant therapy. In some embodiments, the group of peptide structures in Tables 43B, 43C, or 43D is listed in order of relative significance to the disease indicator.

[0124] In an embodiment, the method can further include preparing a sample of the biological sample using reduction, alkylation, and enzymatic digestion to form a prepared sample that includes a set of peptide structures. The method can further include generating the peptide structure data from the prepared sample using multiple reaction monitoring mass spectrometry (MRM-MS).

[0125] In an embodiment, a method of training a model to diagnose a subject with respect to an ovarian cancer disease state having a malignant pelvic tumor is described. The method can include receiving quantification data for a panel of peptide structures for a plurality of samples for a plurality of subjects. The plurality of subjects includes a first portion diagnosed with a classification of early stage ovarian cancer disease state and a second portion diagnosed with a classification of late stage ovarian cancer disease state. The quantification data can include a plurality of peptide structure profiles for the plurality of subjects and training a machine learning model using the quantification data to diagnose a biological sample with respect to the ovarian cancer disease state using a group of peptide structures associated with the ovarian cancer disease state, wherein the group of peptide structures is identified in Tables 43B, 43C, or 43D. The machine learning model can include a logistic regression model.

[0126] The method of training the model can further include identifying an initial plurality of peptide structure profiles, filtering the initial plurality of peptide structure profiles by a coefficient of variation to generate a plurality of peptide structure profiles for use in training the machine learning model. The filtering can be performed to exclude peptide structure profiles having the coefficient of variation at or above 20%. The training of the machine learning model can include reducing the plurality of peptide structure profiles using LASSO regression to identify a final group of peptide structures identified in Tables 43B, 43C, or 43D. The quantification data for the panel of peptide structures for the plurality of subjects diagnosed with the plurality of ovarian cancer disease states can include at least one of an abundance, a relative abundance, a normalized abundance, a relative quantity, an adjusted quantity, a normalized quantity, a relative concentration, an adjusted concentration, or a normalized concentration. The trained model can use a relative abundance for a first portion of the first group of peptide structures and a concentration for a second portion of the second group of peptide structures. Each peptide structure profile of the plurality of peptide structure profiles includes a feature selected from one of a relative abundance and a concentration for a corresponding peptide structure. The plurality of peptide structure profiles can include a first peptide structure profile with a relative abundance for a corresponding peptide structure and a second peptide structure profile with a concentration for the corresponding peptide structure.

[0127] In an embodiment, a composition can include at least one of peptide structures identified in Tables 43B, 43C, or 43D.

[0128] In an embodiment, a method for diagnosing a subject with respect to an ovarian cancer disease state is described. The method can include analyzing the peptide structure data using a supervised machine learning model to generate a disease indicator that indicates whether a biological sample evidences the ovarian cancer disease state of having early stage or late stage ovarian cancer based on a group of glycopeptide structures. The group of glycopeptide structures can include tri-antennary or tetra-antennary sialic acid moieties, wherein a portion of the glycopeptide structures of the group are fucosylated. A diagnosis is then outputted based on the disease indicator. The group of glycopeptide structures can include at least one, at least three, at least five, or at least 10 glycopeptide structure identified in Tables 43B, 43C, or 43D.

[0129] In an embodiment, the peptide structure data was generated with a mass spectrometer using the biological sample obtained from the subject.

[0130] In an embodiment, the method can further include preparing a sample of the biological sample using reduction, alkylation, and enzymatic digestion to form a prepared sample that includes a set of peptide structures. The peptide structure data can be generated from the prepared sample using multiple reaction monitoring mass spectrometry (MRM-MS). The use of the MRM-MS can include ionizing one or more glycopeptides to form ionized glycopeptides; filtering the ionized glycopeptides with a mass filter to form filtered glycopeptides; fragmenting the filtered glycopeptides in a collision chamber into product ions; and detecting the product ions.

[0131] In one or more embodiments, a system comprising one or more data processors is described according to various embodiments. In various embodiments, the system comprises a non-transitory computer readable storage medium containing instructions which, when executed on the one or more data processors, cause the one or more data processors to perform part or all of any of the methods described herein.

[0132] In one or more embodiments, a computer-program product tangibly embodied in a non-transitory machine-readable storage medium, including instructions configured to cause one or more data processors to perform part or all of any one of the methods described according to various embodiments.

[0133] In one or more embodiments, a system is described according to various embodiments. In various embodiments, the system comprises one or more data processors and a non-transitory computer readable storage medium containing instructions which, when executed on the one or more data processors, cause the one or more data processors to perform part or all of any one or more of the methods described herein.

[0134] In one or more embodiments, a computer-program product tangibly embodied in a non-transitory machine-readable storage medium, including instructions configured to cause one or more data processors to perform part or all of any one or more of the methods described herein.

[0135] In various embodiments, the peptide structure data is listed in Table 43D and the detected product ion comprises a first product having a m/z value listed in Table 44C.

[0136] In some embodiments, the at least one peptide structure comprises a peptide sequence and a glycan structure, wherein the glycan structure is attached to a linking site position in the peptide sequence in accordance with one of Tables 41, 42, 43A, 43B, 43C, and 43D. In some embodiments, the glycan structure of the peptide sequence corresponds to a glycan structure GL number in accordance with Tables 41, 42, 43A, 43B, 43C, and 43D, wherein the glycan structure comprises a symbol structure in accordance with the glycan structure GL number according to Tables 41, 42, 43A, 43B, 43C, 43D, and 47. In some embodiments, the glycan structure of the peptide sequence corresponds to a glycan structure GL number in accordance with Tables 41, 42, 43A, 43B, 43C, and 43D, wherein the glycan structure comprises a composition in accordance with the glycan structure GL number, Tables 41, 42, 43A, 43B, 43C, 43D, and 47. In some embodiments, a rightmost N-acetylgalactosamine (open square) of the glycan structure in Table 47 is attached to a linking site position in the peptide sequence in accordance with Tables 43A and 4. In some embodiments, a bottommost N-acetylglucosamine (dark square) of the glycan structure in Table 47 is attached to a linking site position in the peptide sequence in accordance with Tables 41, 42, 43A, 43B, 43C, 43D, and 45.

[0137] In some embodiments, provided herein is a composition comprising one or more peptide structures from Tables 41, 42, 43A, 43B, 43C, and 43D. In some embodiments, the at least one peptide structure comprises a peptide sequence and a glycan structure, wherein the glycan structure is attached to a linking site position in the peptide sequence in accordance with Tables 41, 42, 43A, 43B, 43C, and 43D. In some embodiments, the glycan structure of the peptide sequence corresponds to a glycan structure GL number in accordance with Tables 41, 42, 43A, 43B, 43C, and 43D, wherein the glycan structure comprises a symbol structure in accordance with the glycan structure GL number according to Tables 41, 42, 43A, 43B, 43C, 43D, and 47. In some embodiments, the glycan structure of the peptide sequence corresponds to a glycan structure GL number in accordance with Tables 41, 42, 43A, 43B, 43C, and 43D, wherein the glycan structure comprises a composition in accordance with the glycan structure GL number, Tables 41, 42, 43A, 43B, 43C, 43D, and 47. In some embodiments, a rightmost N-acetylgalactosamine (GalNAc) of the glycan structure in Table 47 is attached to a linking site position in the peptide sequence in accordance with Tables 43A, 43B, 43C, 43D, and 45. In some embodiments, a bottommost N-acetylglucosamine (GlcNAc) of the glycan structure in Table 47 is attached to a linking site position in the peptide sequence in accordance with Tables 41, 42, 43A, 43B, 43C, 43D, and 45.

[0138] In regards to the various embodiments, the peptide sequence can be one of SEQ ID NOS: 504-509, 511, 513, 514, 517, 522, 523, 529, 532-536, 540, and 545.

[0139] In regards to the various embodiments, the peptide structure of the at least one peptide structures comprises a glycopeptide structure defined by a peptide sequence and a glycan structure linked to the peptide sequence at a linking site of the peptide sequence, as identified in Table 43D, with the peptide sequence being one of SEQ ID NOS: 504-509, 511, 513, 514, 517, 522, 523, 529, 532-536, 540, and 545 in Table 43D as defined in Table 45.

[0140] In one or more embodiment, a method is provided for managing a treatment for a subject diagnosed with a melanoma condition. The method includes receiving peptide structure data corresponding to a set of glycoproteins in a biological sample obtained from the subject. A treatment score is computed using quantification data identified from the peptide structure data for a set of peptide structures. The set of peptide structures includes at least one peptide structure identified from a plurality of peptide structures listed in Tables A.1-2 or Table B.1-2. A treatment output that indicates a predicted response to the treatment for the subject is generated using the treatment score.

[0141] In one or more embodiments, a method is provided for treatment management of a subject diagnosed with a melanoma condition. The method includes receiving peptide structure data corresponding to a set of peptide structures associated with a set of glycoproteins in a biological sample obtained from the subject. A plurality of treatment scores is computed using quantification data identified from the peptide structure data for a plurality of subsets of the set of peptide structures. Each treatment score of the plurality of treatment scores corresponds to a different treatment of a plurality of treatments; wherein each subset of the plurality of subsets includes at least one peptide structure identified from a plurality of peptide structures listed in Tables A.1-2 or Table B.1-2. A comparison analysis of the plurality of treatment scores is performed. A treatment output is generated based on the comparison analysis. The treatment output includes a recommended treatment plan for treating the subject.

[0142] In one or more embodiments, a method is provided for treatment management of a subject diagnosed with a melanoma condition. The method includes receiving peptide structure data corresponding to a set of peptide structures associated with a set of glycoproteins in a biological sample obtained from the subject. A first treatment score is computed for a first treatment of pembrolizumab using first quantification data identified from the peptide structure data for a first subset of the set of peptide structures. The first subset includes at least one peptide structure identified from a plurality of peptide structures listed in Tables A.1-2. A second treatment score is computed for a second treatment comprised of nivolumab and ipilimumab using second quantification data identified from the peptide structure data for a second subset of the set of peptide structures. The second subset includes at least one peptide structure identified from a plurality of peptide structures listed in Table B.1-2. A comparison analysis of the first treatment score and the second treatment score is performed. A treatment output is generated based on the comparison analysis. The treatment output identifies one of the first treatment and the second treatment as a recommended treatment for the subject.

[0143] In one or more embodiments, a method is provided for treating a subject diagnosed with a melanoma condition. The method includes receiving peptide structure data corresponding to a set of glycoproteins in a biological sample obtained from the subject. A treatment score is computed using quantification data identified from the peptide structure data for a set of peptide structures. The set of peptide structures includes at least one peptide structure identified from a plurality of peptide structures listed in Tables A.1-2 or Table B.1. A treatment output that indicates a predicted response to a treatment for the subject is generated using the treatment score. The treatment is administered to the patient in response to the predicted response including a positive response classification. The step of administering comprises at least one of intravenous or oral administration of the recommended treatment or a derivative thereof at a therapeutic dosage. The treatment is selected as one from a group consisting of: a first treatment of pembrolizumab for which the therapeutic dosage of at least one of 200 mg every three weeks, 2 mg/kg every three weeks is administered, or 400 mg every 6 weeks; and a second treatment comprised of nivolumab and ipilimumab for which the therapeutic dosage of either 1 mg/kg nivolumab with 3 mg/kg ipilimumab or 3 mg/kg nivolumab with 1 mg/kg ipilimumab is administered.

[0144] In one or more embodiments, a method is provided for managing a treatment for a subject diagnosed with a melanoma condition. The method includes receiving sample data for a sample population. The sample data characterizes responses of a plurality of sample subjects diagnosed with the melanoma condition to the treatment and includes sample peptide structure data for a collection of peptide structures for each subject of the plurality of sample subjects. The sample data is grouped based on the responses of the plurality of sample subjects into a first group corresponding to a first response classification and a second group corresponding to a second response classification. A differential abundance analysis is performed using the sample data to compare the first group of the sample data corresponding to the first response classification and the second group of the sample data corresponding to the second response classification to identify a set of peptide structures from the collection of peptide structures. The set of peptide structures comprises a selected N most differentiating peptide structures between the first response classification and the second response classification. Peptide structure data corresponding to a set of glycoproteins in a biological sample obtained from the subject is received. A treatment score is computed for the treatment using quantification data identified from the peptide structure data for the set of peptide structures. A treatment output that indicates a predicted response to the treatment for the subject is generated using the treatment score.

[0145] In one or more embodiments, a method of treating melanoma in a subject is provided. The method includes receiving peptide structure data corresponding to a set of glycoproteins in a biological sample obtained from the subject. A treatment score is computed using quantification data identified from the peptide structure data for a set of peptide structures. The set of peptide structures includes at least one peptide structure identified from a plurality of peptide structures listed in Tables A.1-2 or Table B.1. A treatment output is computed using the treatment score. A pembrolizumab treatment is administered to the subject if the treatment output includes at least one of a positive response classification for the pembrolizumab treatment or an identification of the pembrolizumab treatment as a recommended treatment.

[0146] In one or more embodiments, a method of treating melanoma in a subject is provided. The method includes receiving peptide structure data corresponding to a set of glycoproteins in a biological sample obtained from the subject. A treatment score is computed using quantification data identified from the peptide structure data for a set of peptide structures. The set of peptide structures includes at least one peptide structure identified from a plurality of peptide structures listed in Tables A.1-2 or Table B.1. A treatment output is computed using the treatment score. A combination treatment comprising a combination of nivolumab and ipilimumab is administered to the subject if the treatment output includes at least one of a positive response classification for the combination treatment or an identification of the combination treatment as a recommended treatment.

[0147] In one or more embodiments, a method of identifying patients with melanoma for treatment with a pembrolizumab treatment is provided. The method includes receiving peptide structure data corresponding to a set of glycoproteins in a biological sample obtained from the subject. A treatment score is computed using quantification data identified from the peptide structure data for a set of peptide structures. The set of peptide structures includes at least one peptide structure identified from a plurality of peptide structures listed in Tables A.1-2 or Table B.1. A treatment output is generated using the treatment score. The patient is treated with the pembrolizumab treatment if the treatment output includes at least one of a positive response classification for the pembrolizumab treatment or an identification of the pembrolizumab treatment as a recommended treatment.

[0148] In one or more embodiments, a method of identifying patients with melanoma for treatment with a combination treatment comprising nivolumab and ipilimumab is provided. The method includes receiving peptide structure data corresponding to a set of glycoproteins in a biological sample obtained from the subject. A treatment score is computed using quantification data identified from the peptide structure data for a set of peptide structures. The set of peptide structures includes at least one peptide structure identified from a plurality of peptide structures listed in Tables A.1-2 or Table B.1. A treatment output is generated using the treatment score. The patient is treated with the combination treatment if the treatment output includes at least one of a positive response classification for the combination treatment or an identification of the combination treatment as a recommended treatment.

[0149] In one or more embodiments, a method is provided for analyzing a set of peptide structures in a sample from a patient. The method includes (a) obtaining the sample from the patient; (b) preparing the sample to form a prepared sample comprising a set of peptide structures; (c) inputting the prepared sample into a reaction monitoring mass spectrometry system to detect a set of product ions associated with each peptide structure of the set of peptide structures; and (d) generating quantification data for the set of product ions using the reaction monitoring mass spectrometry system. The set of peptide structures includes at least one peptide structure selected from peptide structures PS-330 to PS-367 identified in Table 60A. The set of peptide structures includes a peptide structure that is characterized as having: (i) a precursor ion with a mass-charge (m/z) ratio within 1.5 of the m/z ratio listed for the precursor ion in Table 60A as corresponding to the peptide structure; and (ii) a product ion having an m/z ratio within ±1.0 of the m/z ratio listed for the first product ion in Table 60A as corresponding to the peptide structure.

[0150] In one or more embodiments, a composition is provided, the composition comprising a peptide structure or a product ion, wherein: the peptide structure or product ion comprises the amino acid sequence having at least 90% sequence identity to any one of SEQ ID NOS: 570-595, corresponding to peptide structures PS-330 to PS-367 in Table 55; and the product ion is selected as one from a group consisting of product ions identified in Table 60A including product ions falling within an identified m/z range.

[0151] In one or more embodiments, a composition is provided, the composition comprising a glycopeptide structure selected as one from a group consisting of peptide structures PS-330 to PS-367 identified in Table 60A. The glycopeptide structure comprises: an amino acid peptide sequence identified in Table 7 as corresponding to the glycopeptide structure; and a glycan structure identified in Table 55 as corresponding to the glycopeptide structure in which the glycan structure is linked to a residue of the amino acid peptide sequence at a corresponding position identified in Table 55. The glycan structure has a glycan composition.

[0152] In one or more embodiments, a composition is provided, the composition comprising a peptide structure selected as one from a plurality of peptide structures identified in Table 55. The peptide structure has a monoisotopic mass identified as corresponding to the peptide structure in Table 55. The peptide structure comprises the amino acid sequence of SEQ ID NOS: 570-595 identified in Table 55 as corresponding to the peptide structure.

[0153] In one or more embodiments, a kit is provided, the kit comprising at least one agent for quantifying at least one peptide structure identified in Tables A.1-2 or Table B.lto carry out at least a portion of any one of the methods disclosed herein.

[0154] In one or more embodiments, a kit is provided, the kit comprising at least one of a glycopeptide standard, a buffer, or a set of peptide sequences to carry out at least a portion of any one of the methods disclosed herein, a peptide sequence of the set of peptide sequences identified by a corresponding one of SEQ ID NOS: 570-595, defined in Table 55.

[0155] Provided herein are methods, devices, and kits for identifying glycoproteomic biomarkers and signatures for diagnosis of a disease or a condition, such as cancer, progression of the disease or condition, and response of the disease or condition to a treatment, such as treatment with immune checkpoint blockade for cancer.

[0156] Provided herein are methods for identifying one or more glycopeptide biomarkers predictive of a disease or a condition in a subject, the method comprising: (a) obtaining from a subject a first sample at a first timepoint and a second sample at a second timepoint, wherein the first sample and the second sample comprise a glycoprotein; (b) fragmenting the glycoprotein in the first sample or the second sample into one or more glycopeptides, wherein the one or more glycopeptides comprise one or more amino acid sequences selected from a group consisting of SEQ ID NO: 673-703, 731-779, and 570-595, and combinations thereof, (c) determining an amount of the one or more glycopeptides using multiple reaction monitoring mass spectrometry (MRM-MS); (d) associating the amount of the one or more glycopeptides with the first timepoint or the second timepoint, wherein the subject has a change in a disease or a condition from the first timepoint to the second timepoint; and (e) identifying as glycopeptide biomarkers the glycopeptide where the amount of the one or more glycopeptides changed from the first timepoint to the second timepoint.

[0157] Provided herein are methods for identifying one or more glycopeptide biomarkers predictive of a disease or a condition in a subject, the method comprising: (a) obtaining, by a computer, data of an amount of one or more glycopeptides for a set (n) of subjects, wherein the one or more glycopeptides are generated by fragmenting a glycoprotein in a sample from a subject, the amount of one or more glycopeptides are determined using multiple reaction monitoring mass spectrometry (MRM-MS), and the data for each subject comprises data from samples taken at a plurality of timepoints; (b) selecting, by the computer, a subset of the one or more glycopeptides to include in a predictive model; (c) assessing, by the computer, the predictive model using a cross-validation with n-1 subjects to generate an outcome score for a holdout subject; (d) iterating, by the computer, step (c) for each of n subjects as the holdout subject to generate an outcome score for each subject; (e) dichotomizing, by the computer, the outcome scores for each subject at a cutoff outcome score as below or above the cutoff outcome score; (f) analyzing, by the computer, the amount of one or more glycopeptides for subjects having outcome scores above the cutoff outcome score to the amount of one or more glycopeptides for subjects having outcome scores below the cutoff outcome score for each glycopeptide in the subset of the one or more glycopeptides to determine a hazard ratio and an interaction p-value for each glycopeptide; (g) identifying, by the computer, the glycopeptide having the interaction p-value ≤0.05 as a glycopeptide biomarker for predicting the disease or the condition. In some embodiments, the cross-validation is leave-one-out cross-validation (LOOCV). In some embodiments, the cutoff outcome score was determined to optimize Harrell's C-index. In some embodiments, the interaction p-value is less than or equal to 0.01, 0.005, or 0.001 in step (g).

[0158] Provided herein are methods for assessing a status of a condition and a treatment in a subject, the method comprising: (a) fragmenting a glycoprotein in a sample from a subject into one or more glycopeptides, wherein the sample comprises one or more of glycoproteins, glycans, or glycopeptides; (b) performing mass spectroscopy (MS) on the one or more glycopeptides using multiple reaction monitoring mass spectrometry (MRM-MS) to quantify an amount of the one or more glycopeptides in the sample, wherein the one or more glycopeptides comprise one or more amino acid sequences selected from a group consisting of SEQ ID NOs: 7, 9, 12, 15, 16, 18, 20, 30, 34, 37, 44, 59, 60, 61, 62, 66, 69, 70, 75, 77, 80, and 83, and combinations thereof, (c) inputting data of the amount of the one or more glycopeptides into a trained model to generate an output probability, wherein the output probability is indicative of whether a treatment positively influences an outcome of the subject having a condition; and (d) generating a treatment recommendation based on the output probability, wherein the condition is melanoma and the treatment comprises checkpoint inhibitors. In some embodiments, the outcome comprises overall survival time. In some embodiments, the outcome comprises progression-free survival time. In some embodiments, the treatment comprises one or more of ipilimumab, nivolumab, and pembrolizumab. In some embodiments, the treatment comprises one or more of PD-1—, PD-L1—, and CTLA-4-inhibitors. In some embodiments, the recommendation comprises continuing the treatment if the output probability indicates the treatment positively influences the outcome.

[0159] Furthermore, provided herein are methods for assessing a status of a condition and a treatment in a subject, the method comprising: (a) fragmenting a glycoprotein in a sample from a subject into one or more glycopeptides, wherein the sample comprises one or more of glycoproteins, glycans, or glycopeptides; (b) performing mass spectroscopy (MS) on the one or more glycopeptides using multiple reaction monitoring mass spectrometry (MRM-MS) to quantify an amount of the one or more glycopeptides in the sample, wherein the one or more glycopeptides comprise one or more amino acid sequences selected from a group consisting of SEQ ID NOs: 826-955, and combinations thereof, (c) inputting data of the amount of the one or more glycopeptides into a trained model to generate an output probability, wherein the output probability is indicative of whether a treatment positively influences an outcome of the subject having a condition; and (d) generating a treatment recommendation based on the output probability, wherein the condition is non-small cell lung cancer (NSCLC) and the treatment comprises checkpoint inhibitors. In some embodiments, the outcome comprises overall survival time. In some embodiments, the outcome comprises progression-free survival time. In some embodiments, the treatment comprises one or more of ipilimumab, nivolumab, and pembrolizumab. In some embodiments, the treatment comprises one or more of PD-1—, PD-L1-, and CTLA-4-inhibitors. In some embodiments, the treatment comprises chemotherapy. In some embodiments, the chemotherapy comprises one or more of carboplatin and pemetrexed. In some embodiments, the recommendation comprises continuing the treatment if the output probability indicates the treatment positively influences the outcome.

[0160] Provided herein are glycopeptides comprising an amino acid sequence selected from a group consisting of SEQ ID NOs: 826-955, and combinations thereof.

[0161] Described herein are kits comprising a glycopeptide standard comprising a glycopeptide comprising one or more amino acid sequences selected from a group consisting of SEQ ID NOs: 826-955, and an instruction for using the glycopeptide standard for treating cancer.

[0162] In some embodiments, fragmenting comprises protease digestion. In some embodiments, fragmenting comprises applying a mechanical force. In some embodiments, the amount of one or more glycopeptides measures multiple reaction monitoring (MRM) transitions. In some embodiments, the method comprises further generating a panel of glycopeptide biomarkers comprising one or more of the glycopeptide biomarkers identified in step (e). In some embodiments, the cross-validation is leave-one-out cross-validation (LOOCV). In some embodiments, the cutoff outcome score was determined to optimize Harrell's C-index. In some embodiments, the interaction p-value is less than or equal to 0.01, 0.005, or 0.001 in step (g). In some embodiments, the outcome comprises overall survival time. In some embodiments, the outcome comprises progression-free survival time. In some embodiments, the treatment comprises one or more of ipilimumab, nivolumab, and pembrolizumab. In some embodiments, the treatment comprises one or more of PD-1-, PD-L1-, and CTLA-4-inhibitors. In some embodiments, the treatment comprises chemotherapy. In some embodiments, the chemotherapy comprises one or more of carboplatin and pemetrexed. In some embodiments, the recommendation comprises continuing the treatment if the output probability indicates the treatment positively influences the outcome.

[0163] In one or more embodiments, a system is provided that includes one or more data processors and a non-transitory computer readable storage medium containing instructions which, when executed on the one or more data processors, cause the one or more data processors to perform part or all of one or more methods disclosed herein.

[0164] In one or more embodiments, a computer-program product is provided that is tangibly embodied in a non-transitory machine-readable storage medium and that includes instructions configured to cause one or more data processors to perform part or all of one or more methods disclosed herein.

[0165] Provided herein are methods for classifying subject as likely to respond to pembrolizumab therapy or not likely to respond to pembrolizumab therapy based upon detection of peptides and/or glycopeptides provided herein. Also provided herein are method of treating subjects comprising detecting one or more peptides or glycopeptides provided herein and providing a treatment recommendation (such as to treat with a pembrolizumab therapy or to treat with an alternative therapy.)

[0166] In one or more embodiments, a method is provided for managing a treatment for a subject diagnosed with a melanoma condition. The method includes receiving peptide structure data corresponding to a set of glycoproteins in a biological sample obtained from the subject. A treatment score can be computed using quantification data identified from the peptide structure data for a set of peptide structures, wherein the set of peptide structures includes at least one peptide structure identified from a plurality of peptide structures listed in Table 70. A treatment output can be generated that indicates a predicted response to a treatment for the subject using the treatment score wherein the biological sample was obtained from the subject after the subject has received the treatment.

[0167] In one or more embodiments, the generating of the treatment output includes generating the predicted response to the treatment based on whether the treatment score is above a selected threshold. In one or more embodiments, the selected threshold can be 0.5.

[0168] In one or more embodiments, the generating the predicted response includes identifying a first predicted response classification for the subject when the treatment score is above 0.5 and identifying a second predicted response classification for the subject when the treatment score is not above 0.5.

[0169] In one or more embodiments, the first predicted response classification is sustained control and wherein the second predicted response classification is early disruption.

[0170] In one or more embodiments, the treatment outcome includes a recommendation to modify a treatment plan for the subject.

[0171] In one or more embodiments, the recommendation for modifying the treatment plan includes at least one of selecting a different treatment for the subject, altering a dosage for the treatment, or combining the treatment with at least one other treatment.

[0172] In one or more embodiments, the computing the treatment score includes computing a proportion of the set of peptide structures having a selected abundance greater than a reference abundance.

[0173] In one or more embodiments, the reference abundance for a peptide structure of the set of peptide structures is a median of a plurality of abundances for the peptide structure across a sample population and wherein the selected abundance for a glycopeptide structure of the set of peptide structures is a relative abundance and the selected abundance for an aglycosylated peptide structure of the set of peptide structures is an absolute abundance.

[0174] In one or more embodiments, the method further includes identifying the set of peptide structures using sample data and a statistical algorithm that identifies a relative significance for each peptide structure of a collection of peptide structures corresponding to the sample data. The statistical algorithm can include a Wilcoxon rank-sum test.

[0175] In one or more embodiments, the identifying the set of peptide structures includes performing a differential abundance analysis using the sample data to compare a first portion of the sample data corresponding to a first response classification for the treatment and a second portion of the sample data corresponding to a second response classification for the treatment to identify a selected N most differentiating peptide structures between the first response classification and the second response classification.

[0176] In one or more embodiments, the selected N most differentiating peptide structures is 20 peptide structures.

[0177] In one or more embodiments, the first response classification is sustained control which indicates an absence of disruption events during a sustained period of time after treatment administration. The second response classification is early disruption which indicates a presence of at least one disruption event during an initial period of time after treatment. The sustained period of time is longer than the initial period of time.

[0178] In one or more embodiments, the sustained period of time is 12 months and the initial period of time is 6 months.

[0179] In one or more embodiments, the at least one peptide structure includes a glycopeptide structure defined by a peptide sequence and a glycan structure linked to the peptide sequence at a linking site of the peptide sequence, as identified in Tables 70 and 76, with the peptide sequence being one of SEQ ID NOS: 826-955.

[0180] In one or more embodiments, the quantification data for a peptide structure of the set of peptide structures comprises at least one of an adjusted abundance, a relative abundance, an absolute abundance, a normalized abundance, a relative quantity, an adjusted quantity, a normalized quantity, a relative concentration, an adjusted concentration, or a normalized concentration.

[0181] In one or more embodiments, the peptide structure data is generated using multiple reaction monitoring mass spectrometry (MRM-MS).

[0182] In one or more embodiments, the method further includes creating a sample from the biological sample; and preparing the sample using reduction, alkylation, and enzymatic digestion to form a prepared sample that includes a set of peptide structures.

[0183] In one or more embodiments, the method further includes generating the peptide structure data from the prepared sample using multiple reaction monitoring mass spectrometry (MRM-MS).

[0184] In one or more embodiments, the treatment output includes at least one of a design for the treatment or a therapeutic dosage for the treatment.

[0185] In one or more embodiments, the method further includes sending the treatment output to a remote system.

[0186] In one or more embodiments, the method further includes administering a therapeutic dosage of the treatment based on the predicted response being a predicted response classification that indicates the treatment will be successful.

[0187] In one or more embodiments, the method further includes administering a therapeutic dosage of the treatment based on the predicted response being sustained control.

[0188] In one or more embodiments, the predicted response to the treatment is the same for the subject if the biological sample was obtained from the subject either before or after the subject has received the treatment.

[0189] In one or more embodiments, the biological sample was obtained from the subject about 6 weeks to about 6 months after the subject has received the treatment.

[0190] In one or more embodiments, the treatment is pembrolizumab or a combination of nivolumab and ipilimumab.

[0191] In one or more embodiments, a method for treating a subject diagnosed with a melanoma condition. It includes receiving peptide structure data corresponding to a set of glycoproteins in a biological sample obtained from the subject, wherein the biological sample was obtained from the subject before the subject has received a treatment. A treatment score was computed using quantification data identified from the peptide structure data for a set of peptide structures, wherein the set of peptide structures includes at least one peptide structure identified from a plurality of peptide structures listed in Table 70. A treatment output was generated that indicates a predicted response to the treatment for the subject using the treatment score. The treatment was administered to the subject in response to the predicted response includes a positive response classification, the step of administering comprising at least one of intravenous or oral administration of the recommended treatment or a derivative thereof at a therapeutic dosage, wherein the treatment is selected as one from a group consisting of: a first treatment of pembrolizumab for which the therapeutic dosage of at least one of 200 mg every three weeks, 2 mg/kg every three weeks is administered, or 400 mg every 6 weeks; and a second treatment comprised of nivolumab and ipilimumab for which the therapeutic dosage of either 1 mg/kg nivolumab with 3 mg/kg ipilimumab or 3 mg/kg nivolumab with 1 mg/kg ipilimumab is administered. The method further includes receiving peptide structure data corresponding to a set of glycoproteins in a biological sample obtained from the subject after the administering the treatment to the subject. Another treatment score was computed using quantification data identified from the peptide structure data for the set of peptide structures, wherein the set of peptide structures includes at least one peptide structure identified from the plurality of peptide structures listed in Table 70. Another treatment output was generated that indicates a predicted response to a treatment for the subject using the another treatment score, wherein the predicted response to the treatment for the subject using the another treatment score is the same as the predicted response to the treatment for the subject using the treatment score.

[0192] In one or more embodiments, the biological sample was obtained from the subject about 6 weeks to about 6 months after the administering the treatment to the subject.

[0193] In one or more embodiments, the at least one peptide structure includes a glycopeptide structure defined by a peptide sequence and a glycan structure linked to the peptide sequence at a linking site of the peptide sequence, as identified in Tables 70 and 76, with the peptide sequence being one of SEQ ID NOS: 826-955.

### BRIEF DESCRIPTION OF THE DRAWINGS

[0194] The present disclosure is described in conjunction with the accompanying figures:

[0195] FIG. 1 is a schematic diagram of an exemplary workflow for the detection of peptide structures associated with a disease state for use in diagnosis and/or treatment in accordance with various embodiments.

[0196] FIG. 2A is a schematic diagram of a preparation workflow in accordance with various embodiments.

[0197] FIG. 2B is a schematic diagram of data acquisition in accordance with various embodiments.

[0198] FIG. 3 is a block diagram of an analysis system in accordance with various embodiments.

[0199] FIG. 4 is a block diagram of a computer system in accordance with various embodiments.

[0200] FIG. 5 is a flowchart of a process for evaluating a biological sample obtained from a subject with respect to an FLD progression in accordance with various embodiments.

[0201] FIG. 6 is a flowchart of a process for detecting the presence of a disease state associated with an FLD progression in accordance with various embodiments.

[0202] FIGS. 7A and 7B are flowcharts of a process for training a supervised machine learning model for determining which state of a plurality of states a biological sample corresponds in accordance with various embodiments. FIG. 7A generally concerns delineation of a plurality of states based on peptide structure profiles, and FIG. 7B concerns using the resultant data to determine the presence or absence of NASH.

[0203] FIG. 8 is a flow chart of a process for classifying a biological sample as corresponding to one of a plurality of states associated with fatty liver disease (FLD) progression in accordance with various embodiments.

[0204] FIG. 9 is a flowchart of a process for treating a subject for NASH in accordance with various embodiments.

[0205] FIG. 10 provides sample distribution characteristics for controls and subject with NASH for generation of the representative models herein.

[0206] FIG. 11 provides a Classifier for NASH early (F1&F2) vs NASH late (F3&F4) utilizing within normal markers only (adjusting for relative abundance of the same glycopeptide in the flanking serum run concomitantly with the samples in which the adjusting refers to taking an average of flanking serum values).

[0207] FIG. 12 shows Multivariable Classifier for Control vs NASH-early vs NASH-late utilizing within normal markers only.

[0208] FIG. 13 is a flowchart of a process for diagnosing a subject with respect to a breast cancer (BC) disease state in accordance with one or more embodiments.

[0209] FIG. 14 is a flowchart of a process for training a model to diagnose a subject with respect to breast cancer (BC) disease state in accordance with one or more embodiments.

[0210] FIG. 15 is a flowchart of a process for monitoring a subject for a breast cancer (BC) in accordance with one or more embodiments.

[0211] FIG. 16 is a receiver operating characteristic (ROC) curve in accordance with various embodiments.

[0212] FIG. 17 is a flowchart of a process for diagnosing a subject with respect to a pancreatic cancer (PC) disease state in accordance with one or more embodiments.

[0213] FIG. 18 is a flowchart of a process for training a model to diagnose a subject with respect to pancreatic cancer (PC) disease state in accordance with one or more embodiments.

[0214] FIG. 19 is a flowchart of a process for monitoring a subject for a pancreatic cancer (PC) in accordance with one or more embodiments.

[0215] FIG. 20 is a training confusion matrix showing predictive accuracy in accordance with one or more embodiments.

[0216] FIG. 21 is a test confusion matrix showing predictive accuracy in accordance with one or more embodiments.

[0217] FIG. 22 is a table showing performance metrics for the training and testing cohorts overall and by stage in accordance with one or more embodiments.

[0218] FIG. 23 is a table showing performance metrics for the training and testing cohorts by stage in accordance with various embodiments.

[0219] FIG. 24 is a flowchart of a method for quality control (QC) of samples, in accordance with various embodiments.

[0220] FIG. 25 is a flowchart of a method of generating a model to predict an age of a patient, in accordance with various embodiments.

[0221] FIG. 26 is a flowchart of a method of performing quality control of samples, in accordance with various embodiments.

[0222] FIGS. 27A, 27B, and 27C illustrate plots of predicted age versus chronological age for healthy subjects to determine correlation coefficients of various cohorts.

[0223] FIGS. 28A, 28B, and 28C illustrate plots of predicted age versus chronological age for samples that include both disease and healthy subjects to determine correlation coefficients of various cohorts.

[0224] FIG. 29 is a flowchart of a method for quality control (QC) of samples, in accordance with various embodiments.

[0225] FIG. 30 is a flowchart of a method of generating a model to predict a sex of a patient, in accordance with various embodiments.

[0226] FIG. 31 is a flowchart of a method of performing quality control of samples, in accordance with various embodiments.

[0227] FIGS. 32A, 32B, and 32C illustrate plots of accuracy score, sensitivity score, and specificity score for training and test datasets.

[0228] FIG. 33 is a flowchart of a process for classifying a biological sample obtained from a subject with respect to a plurality of states associated with NSCLC in accordance with one or more embodiments.

[0229] FIG. 34 is a flowchart of a process for detecting the presence of one of a plurality of states associated with NSCLC in a subject in accordance with one or more embodiments.

[0230] FIG. 35 is a flowchart of a process for determining one or more of a plurality of treatment regimens for treating NSCLC in a subject in accordance with one or more embodiments.

[0231] FIG. 36 is a flowchart of a process for training a model to diagnose a subject with one of a plurality of states associated with NSCLC in accordance with one or more embodiments.

[0232] FIG. 37 is a flowchart of a process for treating NSCLC in a subject in accordance with one or more embodiments.

[0233] FIG. 38 is a flowchart of a process for diagnosing an individual with NSCLC in accordance with one or more embodiments.

[0234] FIG. 39 is shows an experimental workflow for sample preparation and analysis for either plasma or serum.

[0235] FIG. 40 is a heat map showing relative abundances of the identified peptide structures in control group and NSCLC groups at different stages of NSCLC.

[0236] FIG. 41 is a model performance plot for healthy and all NSCLC stages (1-4) samples illustrating the predictive performance of a regularized regression model (e.g., LASSO regression model) on the training data sets and test data sets.

[0237] FIG. 42 illustrates a receiver-operating-characteristic (ROC) curve/area under curve (AUC) for the regularized regression model (e.g., LASSO regression model) for a healthy control and all NSCLC stages (1-4) samples.

[0238] FIG. 43 is a model performance plot for healthy and early-stage NSCLC (stages 1-2) samples illustrating the predictive performance of regularized regression model (e.g., LASSO regression model) on the training data sets and test data sets.

[0239] FIG. 44 illustrates a receiver-operating-characteristic (ROC) curve/area under curve (AUC) for the regularized regression model (e.g., LASSO regression model) for healthy and early-stage NSCLC (stages 1-2) samples.

[0240] FIG. 45 is a model performance plot for healthy and late-stage NSCLC (stages 3-4) samples illustrating the predictive performance of regularized regression model (e.g., LASSO regression model) on the training data sets and test data sets.

[0241] FIG. 46 illustrates a receiver-operating-characteristic (ROC) curve/area under curve (AUC) for the regularized regression model (e.g., LASSO regression model) for healthy and late-stage NSCLC (stages 3-4) samples.

[0242] FIG. 47 is a flowchart of a process for diagnosing a subject with respect to an ovarian cancer disease state in accordance with one or more embodiments based on Tables 41 or 42.

[0243] FIG. 48A is a flowchart of a process for diagnosing a subject with respect to ovarian cancer disease state in accordance with one or more embodiments based on Table 43A.

[0244] FIG. 48B is a flowchart of a process for diagnosing a subject with respect to ovarian cancer disease state in accordance with one or more embodiments based on Table 43B.

[0245] FIG. 49 is a flowchart of a process for training a model to diagnose a subject with respect to an ovarian cancer disease state in accordance with one or more embodiments.

[0246] FIG. 50 is a table describing the distribution of the samples acquired in this exemplary retrospective analysis in accordance with one or more embodiments.

[0247] FIG. 51 is a plot diagram illustrating the results of a principal component analysis performed to assess the segregation between healthy, benign pelvic tumor, and EOC samples across first and second principal components in accordance with one or more embodiments.

[0248] FIG. 52 is a plot diagram illustrating the results of a principal component analysis performed to assess segregation between healthy, benign pelvic tumor, early EOC, late EOC, and missing (undocumented) samples).

[0249] FIG. 53 is an illustration of a receiver operating characteristic (ROC) diagram corresponding to the multivariable model built to predict malignancy v. benign status of pelvic tumors in accordance with one or more embodiments.

[0250] FIG. 54 is an illustration of a diagram showing the probability distributions for the various groups using the multivariable model for predicting malignancy v. benign status of pelvic tumors in accordance with one or more embodiments.

[0251] FIG. 55 is an illustration of a receiver operating characteristic (ROC) diagram corresponding to the multivariable model built to predict malignancy v. benign status of pelvic tumors in accordance with one or more embodiments.

[0252] FIG. 56 is an illustration of a diagram showing the probability distributions for the various groups using the multivariable model for predicting malignancy v. benign status of pelvic tumors in accordance with one or more embodiments.

[0253] FIGS. 57A to 57E are a plurality of charts illustrating the upregulation of fucosylated biomarkers having tri or tetra-antennary sialic acids from stages 1/2 to 3/4 of ovarian cancer and the down regulation of non-fucosylated biomarkers having tri or tetra-antennary sialic acids from stages 1/2 to 3/4 of ovarian cancer.

[0254] FIG. 58 is an illustration of a diagram showing the probability distributions for early stage v. late stage ovarian cancer using training data set and the testing data set in accordance with one or more embodiments using the biomarkers of Table 43C.

[0255] FIG. 59 is an illustration of a receiver operating characteristic (ROC) diagram corresponding to the multivariable model built to predict early stage v. late stage ovarian cancer in accordance with one or more embodiments.

[0256] FIG. 60 is a graph illustrating the fold changes for a plurality of tri- and tetra-antennary glycans glycopeptides that were either non-fucosylated or fucosylated.

[0257] FIG. 61A is a graph illustrating the fold changes for pairs of tri- and tetra-antennary glycans glycopeptides that were either non-fucosylated or fucosylated.

[0258] FIG. 61B is a graph illustrating the fold changes for triplets of tri- and tetra-antennary glycans glycopeptides that were either non-fucosylated, mono-fucosylated, or di-fucosylated. Both mono-fucosylated and di-fucosylated markers has median FC's above 1 suggesting correlation of these markers with malignant EOC.

[0259] FIG. 62 is an illustration of a diagram showing the probability distributions for early stage v. late stage ovarian cancer using training data set and the testing data set in accordance with one or more embodiments using the biomarkers of Table 43D

[0260] FIGS. 63A to 63E are graphs of the relative abundance of five distinct types of fucosylated glycopeptides in benign tumors, early stage EOC, and late stage EOC.

[0261] FIG. 64 is a flowchart of a process for managing a treatment for a subject diagnosed with a melanoma condition in accordance with one or more embodiments.

[0262] FIG. 65 is a flowchart of a process for treatment management of a subject diagnosed with a melanoma condition in accordance with various embodiments.

[0263] FIG. 66 is a flowchart of a process for treatment management of a subject diagnosed with a melanoma condition in accordance with various embodiments.

[0264] FIG. 67 is a flowchart of a process for identifying a treatment for a subject diagnosed with a melanoma condition in accordance with one or more embodiments.

[0265] FIG. 68 is a plot showing the distribution of the treatment scores generated for those patients who were treated with pembro in accordance with one or more embodiments.

[0266] FIG. 69 is a plot showing the distribution of the treatment scores generated for those patients who were treated with ipi/nivo in accordance with one or more embodiments.

[0267] FIG. 70 is a scatterplot showing the treatment scores by treatment type in accordance with one or more embodiments.

[0268] FIG. 71 is a plot showing disruption event times for patients treated with pembro by their predicted response.

[0269] FIG. 72 is a plot showing disruption event times for patients treated with ipi/nivo by their predicted response.

[0270] FIGS. 73A and 73B show progression-free survival (PFS) Kaplan-Meier curves of patients with metastatic melanoma for various glycopeptide fragments.

[0271] FIGS. 74A and 74B show progression-free survival (PFS) Kaplan-Meier curves of patients with non-small-cell lung cancer (NSCLC) for various glycopeptide fragments.

[0272] FIGS. 75-100 show overall survival (OS) Kaplan-Meier curves of patients with metastatic melanoma for various glycopeptide fragments.

[0273] FIGS. 101-139 show progression-free survival (PFS) Kaplan-Meier curves of patients with metastatic melanoma for various glycopeptide fragments.

[0274] FIGS. 140A and 140B illustrate an algorithm development pipeline for identifying non-small-cell lung cancer (NSCLC).

[0275] FIGS. 141A and 141B illustrate a multivariate classifier development for case-control studies for identifying non-small-cell lung cancer (NSCLC).

[0276] FIGS. 142A-142D illustrate scoring prediction curves for identifying non-small-cell lung cancer (NSCLC).

[0277] FIG. 143 shows phenotypic data for each of three independent cohorts of baseline samples of immune checkpoint inhibitor-therapy treated NSCLC patients. There is slight heterogeneity in sex distribution and overall survival time distribution across cohort, but nothing drastic.

[0278] FIG. 144 shows that fourteen site-specific glycopeptides are associated with overall survival in the same direction of effect across the three independent cohorts. Age- and sex-adjusted univariate Cox regression show four glycopeptides that are protective against death (HR<1), while the other ten are deleterious (HR>1).

[0279] FIG. 145 shows that a subset of glycopeptides, one example of which is shown here, demonstrate the same statistically significant direction of effect across all three independent cohorts. Using Cohort 3 as the primary cohort of interest (n=125), a cutpoint was chosen that maximizes Harrell's c-index; in other words, we find two groups of patients that have maximally different overall survival outcomes based strictly on glycopeptide expression. This standardized cutpoint was then applied to Cohorts 1 and 2 in their respective Kaplan-Meier plots for the same glycopeptide biomarker.

[0280] FIG. 146 shows the results of a LASSO-regularized classifier on 88 of 125 patients in Cohort 3 (HR=5.0, P=1.0×10\hat{ }-5) using a small subset of site-specific glycopeptides and non-glycosylated peptides, and validated the classifier on the remaining 37 patients (HR=7.2, P=3.0×10\hat{ }-4). In the unseen test set, patients who are classified as “likely to benefit” (Dawn positive) from ICI therapy have a median overall survival of 23.2 months, while those who are classified as “unlikely to benefit” (Dawn negative) have a median overall survival of nearly 5 months.

[0281] FIGS. 147A and 147B show overall survival (OS) Kaplan-Meier curves of patients with non-small-cell lung cancer (NSCLC) for various glycopeptide fragments.

[0282] FIG. 148 is a chart that shows the mean risk scores of the first prediction model as a function of time after the ICI treatment.

[0283] FIG. 149 is a chart that shows the mean risk scores of the second prediction model as a function of time after the ICI treatment.

[0284] FIG. 150 is a chart that shows the mean risk scores of the first prediction model as a function of time after the specific ICI treatment combination therapy of ipilimumab (ipi) and nivolumab (nivo).

[0285] FIG. 151 is a chart that shows the mean risk scores of the first prediction model as a function of time after the specific ICI treatment monotherapy of pembrolizumab (pembro).

[0286] It is to be understood that the figures are not necessarily drawn to scale, nor are the objects in the figures necessarily drawn to scale in relationship to one another. The figures are depictions that are intended to bring clarity and understanding to various embodiments of apparatuses, systems, and methods disclosed herein. Wherever possible, the same reference numbers will be used throughout the drawings to refer to the same or like parts. Moreover, it should be appreciated that the drawings are not intended to limit the scope of the present teachings in any way.

### DETAILED DESCRIPTION

### I. Overview

[0287] The embodiments described herein recognize that glycoproteomics is an emerging field that can be used in the overall diagnosis and/or treatment of subjects with various types of diseases. Glycoproteomics aims to determine the positions, identities, and quantities of glycans and glycosylated proteins in a given sample (e.g., blood sample, cell, tissue, etc.). Protein glycosylation is one of the most common and most complex forms of post-translational protein modification, and can affect protein structure, conformation, and function. For example, glycoproteins may play crucial roles in important biological processes such as cell signaling, host-pathogen interactions, and immune response and disease. Glycoproteins may therefore be important to diagnosing different types of diseases, so their analysis benefits from accuracy. Glycoproteins may also be important to differentiating between stages within disease (e.g., the stages of FLD).

[0288] Although protein glycosylation provides useful information about cancer, other diseases and stage determination of a disease analysis of protein glycosylation or the analysis of protein glycosylation may be difficult as the glycan typically cannot be traced back to the protein site of origin with currently available methodologies. Glycoprotein analysis can be challenging in general for several reasons. For example, a single glycan composition in a peptide may contain a large number of isomeric structures because of different glycosidic linkages, branching, and many monosaccharides having the same mass. Further, the presence of multiple glycans that share the same peptide sequence may cause the mass spectrometry (MS) signal to split into various glycoforms, lowering their individual abundances compared to the peptides that are not glycosylated (aglycosylated peptides).

[0289] However, to understand various disease conditions and disease progressions and to diagnose certain disease states more accurately, it may be important to perform analysis of glycoproteins and to identify not only the glycan but also the linking site (e.g., the amino acid residue of attachment) within the protein. Thus, there is a need to provide a method for site-specific glycoprotein analysis to obtain detailed information about protein glycosylation patterns which may be able to provide information about a disease state. This information can be used to distinguish the disease state from other states, diagnose a subject as having or not having the disease state, determine a likelihood that a subject has the disease state, or a combination thereof. Such analysis may be useful in distinguishing between, for example, without limitation, two or more stages of a non-alcoholic steatohepatitis (NASH) state, and a non-NASH/NASH state (which may include at least one of a non-alcoholic FLD disease state, a control state, a healthy state, or a liver disease-free state). For example, such analysis may be useful in diagnosing a PC disease state for a subject (e.g., a negative diagnosis for the PC disease state or a positive diagnosis for the PC disease state). Sample collection and analysis can be collected at different time points for comparing PC disease states overtime for a subject. For example, the negative diagnosis may include a healthy state, a benign pancreatitis state (i.e. “benign” as seen throughout), and/or a control state. An example of the positive diagnosis includes the subject suffering from a form of pancreatic cancer (e.g., pancreatic adenocarcinoma). A diagnosis can also assess a malignancy status of a mass previously identified on a subject's pancreas.

[0290] Accordingly, the embodiments described herein provide various methods and systems for analyzing proteins in subjects and, in particular, glycoproteins. In various embodiments, a machine learning model is trained to analyze peptide structure data and generate a disease indicator that provides information relating to one or more diseases. For example, in various embodiments, the peptide structure data comprises quantification metrics (e.g., abundance or concentration data) for peptide structures. A peptide structure may be defined by an aglycosylated peptide sequence (e.g., a peptide or peptide fragment of a larger parent protein) or a glycosylated peptide sequence. A glycosylated peptide sequence (also referred to as a glycopeptide structure) may be a peptide sequence having a glycan structure that is attached to a linking site (e.g., an amino acid residue) of the peptide sequence, which may occur via, for example, a particular atom of the amino acid residue). Non-limiting examples of glycosylated peptides include N-linked glycopeptides and O-linked glycopeptides.

[0291] The embodiments described herein recognize that the abundance of selected peptide structures in a biological sample obtained from a subject may be used to determine the likelihood of that subject having a particular disease state (e.g., stage of FLD, including NASH).

[0292] The embodiments described herein recognize that the abundance of selected peptide structures in a biological sample obtained from a subject may be used to determine the likelihood of that subject evidencing a PC disease state. A PC disease state may include any condition that can be diagnosed as cancer that occurs in the pancreas (e.g., pancreatic adenocarcinoma). Further, certain peptide structures that are associated with a PC disease state may be more relevant to that disease state than other peptide structures that are also associated with that disease state.

[0293] Analyzing the abundance of peptide sequences and glycosylated peptide sequences in a biological sample may provide a more accurate way in which to distinguish the state of progression within FLD, including the stages of NASH. This type of peptide structure analysis may be more conducive to generating accurate diagnoses as compared to glycoprotein analysis that focuses on analyzing glycoproteins that are too large to be resolved via mass spectrometry. Further, with glycoproteins, there may be too many potential proteoforms to consider. Still further, analysis of peptide structure data in the manner described by the various embodiments herein may be more conducive to generating accurate diagnoses as compared to glycomic analysis that provides little to no information about what proteins and to which amino acid residue sites various glycan structures attach.

[0294] The description below provides exemplary implementations of the methods and systems described herein for the research, diagnosis, and/or treatment (e.g., designing, planning, and/or manufacturing of a treatment) of a disease state (e.g., a NASH state) associated with FLD. Descriptions and examples of various terms, as used herein, are provided in Section II below.

[0295] The embodiments described herein recognize that the abundance of selected peptide structures in a biological sample obtained from a subject may be used to determine the likelihood of that subject evidencing a PC disease state. A PC disease state may include any condition that can be diagnosed as cancer that occurs in the pancreas (e.g., pancreatic adenocarcinoma). Further, certain peptide structures that are associated with a PC disease state may be more relevant to that disease state than other peptide structures that are also associated with that disease state.

[0296] Analyzing the abundance of peptide sequences and glycosylated peptide sequences in a biological sample may provide a more accurate way in which to distinguish a positive PC disease state (e.g., a state including the presence of pancreatic cancer) from a negative PC disease state (e.g., healthy state, control state, an absence of pancreatic cancer, benign pancreatitis, etc.). This type of peptide structure analysis may be more conducive to generating accurate diagnoses as compared to glycoprotein analysis that focuses on analyzing glycoproteins that are too large to be resolved via mass spectrometry. Further, with glycoproteins, there may be too many potential proteoforms to consider. Still further, analysis of peptide structure data in the manner described by the various embodiments herein may be more conducive to generating accurate diagnoses as compared to glycomic analysis that provides little to no information about what proteins and to which amino acid residue sites various glycan structures attach.

[0297] The description below provides exemplary implementations of the methods and systems described herein for the research, diagnosis, and/or treatment of a PC disease state. Various examples implement the methods and systems described herein as a screening tool. Descriptions and examples of various terms, as used herein, are provided in Section II below.

[0298] In addition to the above noted challenges, glycoproteomic analysis experiments can often involve large sample cohorts with hundreds or thousands of samples where each sample has relevant associated information such as, for example, the chronological age of the subject. It is worthwhile to note that the chronological age refers to the age of a subject based on the birthday of the subject and the date of blood draw. The chronological age is in contrast to an estimated age that is calculated based on the measurement of age-related biomarkers in a sample. Often, an intake form is filled out where the subject's chronological age is inputted into a database, sample manifest or report, and/or incorporated into a label. In many cases, the samples are aliquoted, randomized, treated with various reagents and enzymes, and transferred and mapped onto an auto-sampler for testing in an instrument such as a mass spectrometer. At various steps in the process, there is an opportunity to misidentify or translocate one or more samples. In addition, a clerical error can be made in recording the chronological age of one or more subjects in a cohort. Alternatively, a mapping error can be made by a laboratory operator during any one of the processing steps and/or through the use of loading an auto-sampler. As such, there is a need to perform a process check that identifies an error in the processing of the samples. In an embodiment, an estimated age can be calculated based on the measurement of age-related biomarkers, where the estimated age can be correlated to the chronological age. For situations where the estimated age and the chronological age do not have a good correlation, an error notification can be provided.

[0299] In various embodiments, a method may include estimating age and estimating the gender of the sample where the estimated age can be correlated to the chronological age and the estimated gender can be correlated to the annotated gender of the subject. For situations where the estimated age and the chronological age do not have a good correlation or the estimated gender and the annotated gender do not have a good correlation, an error notification can be provided.

[0300] Accordingly, the embodiments described herein provide various methods and systems for quality control for analyzing glycoproteins in samples from subjects. In one or more embodiments, one or more machine learning models are trained to analyze peptide structure data and generate indicators that provides information relating to quality of the analysis, particularly peptides associated with age of the individuals from which the samples were obtained. For example, in various embodiments for quality control, the peptide structure data comprises quantification metrics (e.g., abundance or concentration data) for peptide structures. A peptide structure may be defined by an aglycosylated peptide sequence (e.g., a peptide or peptide fragment of a larger parent protein) or a glycosylated peptide sequence. A glycosylated peptide sequence (also referred to as a glycopeptide structure) may be a peptide sequence having a glycan structure that is attached to a linking site (e.g., an amino acid residue) of the peptide sequence, which may occur via, for example, a particular atom of the amino acid residue). Non-limiting examples of the age-related glycosylated peptides include N-linked glycopeptides and O-linked glycopeptides.

[0301] The embodiments described herein recognize that the abundance of selected peptide structures in a biological sample obtained from a subject may be used to determine the likelihood that the processing of the samples lacks significant error. Certain peptide structures are associated with the age of individuals, including associated with a range of ages in some embodiments, and these peptide structures act as a constant reference to evaluate the precision of the glycopeptide processing methods. Analyzing the abundance of peptide sequences and glycosylated peptide sequences in a plurality of biological samples may provide a more accurate way in which to ensure that the methods of their analyses were of a suitable quality.

[0302] In addition to the above noted challenges, glycoproteomic analysis experiments can often involve large sample cohorts with hundreds or thousands of samples where each sample has relevant associated information such as, for example, the annotated sex of the subject. It is worthwhile to note that the annotated sex refers to the gender of a subject that is either male or female based on biological characteristics at birth. The annotated sex is in contrast to an estimated sex that is calculated based on the measurement of sex-related biomarkers in a sample. Often, an intake form is filled out where the subject's annotated sex is inputted into a database, sample manifest or report, and/or incorporated into a label. In many cases, the samples are aliquoted, randomized, treated with various reagents and enzymes, and transferred and mapped onto an auto-sampler for testing in an instrument such as a mass spectrometer. At various steps in the process, there is an opportunity to misidentify or translocate one or more samples. In addition, a clerical error can be made in recording the annotated sex of one or more subjects in a cohort. Alternatively, a mapping error can be made by a laboratory operator during any one of the processing steps and/or through the use of loading an auto-sampler. As such, there is a need to perform a process check that identifies an error in the processing of the samples. In an embodiment, an estimated sex can be calculated based on the measurement of sex-related biomarkers, where the estimated sex can be correlated to the annotated sex. For situations where the estimated sex and the annotated sex do not have a good correlation, an error notification can be provided.

[0303] In various embodiments, a method may include estimating age and estimating the gender of the sample where the estimated age can be correlated to the chronological age and the estimated gender can be correlated to the annotated gender of the subject. For situations where the estimated age and the chronological age do not have a good correlation or the estimated gender and the annotated gender do not have a good correlation, an error notification can be provided. To ensure these processes retain accuracy for analysis of the appropriate peptides, an internal standard would be useful, in various embodiments.

[0304] Accordingly, the embodiments described herein provide various methods and systems for quality control for analyzing glycoproteins in samples from subjects. In one or more embodiments, one or more machine learning models are trained to analyze peptide structure data and generate indicators that provides information relating to quality of the analysis, particularly peptides associated with sex of the individuals from which the samples were obtained. For example, in various embodiments for quality control, the peptide structure data comprises quantification metrics (e.g., abundance or concentration data) for peptide structures. A peptide structure may be defined by an aglycosylated peptide sequence (e.g., a peptide or peptide fragment of a larger parent protein) or a glycosylated peptide sequence. A glycosylated peptide sequence (also referred to as a glycopeptide structure) may be a peptide sequence having a glycan structure that is attached to a linking site (e.g., an amino acid residue) of the peptide sequence, which may occur via, for example, a particular atom of the amino acid residue). Non-limiting examples of the sex-related glycosylated peptides include N-linked glycopeptides and O-linked glycopeptides.

[0305] The embodiments described herein recognize that the abundance of selected peptide structures in a biological sample obtained from a subject may be used to determine the likelihood that the processing of the samples lacks significant error. Certain peptide structures are associated with the sex of individuals, and these peptide structures act as a constant reference to evaluate the precision of the glycopeptide processing methods. Analyzing the abundance of peptide sequences and glycosylated peptide sequences in a plurality of biological samples may provide a more accurate way in which to ensure that the methods of their analyses were of a suitable quality.

[0306] Provided herein are methods useful for diagnosing NSCLC based upon one or more biomarkers. In some embodiments, the diagnosis is based upon the presence, absence, and/or amount of one or more peptide structures comprising a sequence set forth in SEQ ID NOs: 224-296 along with the associated glycan set forth in Table 35. In some embodiments, a machine-learning model is used to classify the sample with respect to a state associated with NSCLC, such as NSCLC or a healthy state.

[0307] The embodiments described herein recognize that glycoproteomics is an emerging field that can be used in the overall diagnosis and/or treatment of subjects with various types of diseases. Glycoproteomics aims to determine the positions, identities, and quantities of glycans and glycosylated proteins in a given sample (e.g., blood sample, cell, tissue, etc.). Protein glycosylation is one of the most common and most complex forms of post-translational protein modification, and can affect protein structure, conformation, and function. For example, glycoproteins may play crucial roles in important biological processes such as cell signaling, host-pathogen interactions, and immune response and disease. Glycoproteins may therefore be important to diagnosing different types of diseases.

[0308] Although protein glycosylation provides useful information about cancer and other diseases, analysis of protein glycosylation may be difficult as the glycan typically cannot be traced back to the protein site of origin with currently available methodologies. Glycoprotein analysis can be challenging in general due to several reasons. For example, a single glycan composition in a peptide may contain a large number of isomeric structures because of different glycosidic linkages, branching, and many monosaccharides having the same mass. Further, the presence of multiple glycans that share the same peptide sequence may cause the mass spectrometry (MS) signal to split into various glycoforms, lowering their individual abundances compared to the peptides that are not glycosylated (aglycosylated peptides).

[0309] But to understand various disease conditions and to diagnose certain diseases, such as ovarian cancer, more accurately, it may be important to perform analysis of glycoproteins and to identify not only the glycan but also the linking site (e.g., the amino acid residue of attachment) within the protein. Thus, there is a need to provide a method for site-specific glycoprotein analysis to obtain detailed information about protein glycosylation patterns which may be able to provide information about a disease state (e.g., an ovarian cancer disease state). This information can be used to distinguish the disease state from other states, diagnose a subject as having or not having the disease state, determine a likelihood that a subject has the disease state, determine whether a subject has one of early stage (stages 1 and 2) or late stage (stages 3 and 4) EOC, or a combination thereof. For example, such analysis may be useful in diagnosing an ovarian cancer disease state for a subject (e.g., a negative diagnosis for the ovarian cancer disease state or a positive diagnosis for the ovarian cancer disease state). Sample collection and analysis can be collected at different time points for comparing ovarian cancer disease states over time for a subject. For example, the negative diagnosis may include a healthy state or a benign tumor state (i.e., “benign” as seen throughout). An example of the positive diagnosis includes the subject suffering from a form of ovarian cancer (e.g., epithelial ovarian cancer (EOC)). A diagnosis can also assess a malignancy status of a previously identified pelvic (or adnexal) tumor (or mass).

[0310] Accordingly, the embodiments described herein provide various methods and systems for analyzing proteins in subjects and, in particular, glycoproteins. In one or more embodiments, a machine learning model is trained to analyze peptide structure data and generate a disease indicator that provides information relating to one or more diseases. For example, in various embodiments, the peptide structure data comprises quantification metrics (e.g., abundance or concentration data) for peptide structures. A peptide structure may be defined by an aglycosylated peptide sequence (e.g., a peptide or peptide fragment of a larger parent protein) or a glycosylated peptide sequence. A glycosylated peptide sequence (also referred to as a glycopeptide structure) may be a peptide sequence having a glycan structure that is attached to a linking site (e.g., an amino acid residue) of the peptide sequence, which may occur via, for example, a particular atom of the amino acid residue). Non-limiting examples of glycosylated peptides include N-linked glycopeptides and O-linked glycopeptides.

[0311] The embodiments described herein recognize that the abundance of selected peptide structures in a biological sample obtained from a subject may be used to determine the likelihood of that subject evidencing an ovarian cancer disease state. An ovarian cancer disease state may include any condition that can be diagnosed as cancer that occurs in in the ovaries. Many malignant pelvic tumors are ovarian cancer. Certain peptide structures that are associated with an ovarian cancer disease state may be more relevant to that disease state than other peptide structures that are also associated with that disease state.

[0312] Analyzing the abundance of peptide sequences and glycosylated peptide sequences in a biological sample may provide a more accurate way in which to distinguish a positive ovarian cancer disease state (e.g., a state including the presence of ovarian cancer) from a negative ovarian cancer disease state (e.g., healthy state, a benign tumor state, an absence of ovarian cancer, etc.). This type of peptide structure analysis may be more conducive to generating accurate diagnoses as compared to glycoprotein analysis that focuses on analyzing glycoproteins that are too large to be resolved via mass spectrometry. Further, with glycoproteins, there may be too many potential proteoforms to consider. Still further, analysis of peptide structure data in the manner described by the various embodiments herein may be more conducive to generating accurate diagnoses as compared to glycomic analysis that provides little to no information about what proteins and to which amino acid residue sites various glycan structures attach.

[0313] In many instances, ovarian cancer treated with surgical resection will reoccur due to the metastasis. Thus, there is a need for tests that can diagnose metastatic ovarian cancer and monitor the progression of the disease (e.g., assessing the state of early vs late stage ovarian cancer). Such a test may be based on either ELISA or mass spectrometry.

[0314] For reference, in stage 1, the cancer is confined to the ovaries and hasn't spread to the abdomen, pelvis or lymph nodes, nor to distant sites. In stage 2, the cancer has spread from one or both ovaries to other areas of the pelvis. However, the cancer hasn't spread to nearby lymph nodes or distant sites. Stages 1 and 2 are considered early stage. In stage 3, the cancer has spread to nearby lymph nodes and/or other parts of the abdomen, but it hasn't spread to distant sites. In stage 4, the cancer has spread beyond the abdomen. Stages 3 and 4 are considered late stage.

[0315] A particular type of glycopeptides having fucosylation was found through mass spectrometry measurements to be associated with metastatic ovarian cancer. In addition, this type of glycopeptide had tri- and tetra-antennary N-glycans on certain proteins. In an embodiment, various proteins such as AGP1, AGP2, APOC3, FETUA, HPT, CLUS, A2MG, TRFE, VTNC, IGJ, and CFAH can be captured on an ELISA plate from patient samples followed by a lectin based detection (four lectins: LCA, AAL, PHA-E, PHA-L).

[0316] Mass spectrometry can be used to analyze serum for various glycoproteins and/or glycopeptides to differentiate between benign and malignant adnexal masses. Through analyzing the clinical mass spectrometry data, a distinct signature was found with the circulating N-glycoproteins that allows a differentiation between late stage (metastatic disease of stage III/IV) and early stage (stage I/II) epithelial ovarian cancer (EOC). Using Qiagen's Ingenuity Pathway Analysis package on this data, it was predicted that the signature markers are downstream of cytokine signaling. The markers also suggest the presence of the sialyl Lewis X (sLex) epitope on N-glycans of certain liver-derived circulatory glycoproteins. Given these findings suggesting the presence of sLex epitopes in circulation, it was investigated whether the outer-arm fucosylation was upregulated on the tumor itself. Bulk RNASeq data showed the outer-arm fucosyltransferases FUT3, FUT4, and FUT9 were found to be upregulated in late stage EOC. The core fucosyltransferase FUT8 on the other hand was unchanged between early and late stage EOC. A blood-based test would be useful for staging/treatment recommendations and to preempt recurrence and metastatic transformation of epithelial ovarian cancer.

[0317] Further, the methods, systems, and compositions provided by the embodiments described herein may enable an earlier and more accurate diagnosis of ovarian cancer in a subject as compared to currently available diagnostic modalities (e.g., imaging, biochemical tests) used for determining whether surgical intervention is indicated. For example, various currently available non-invasive tests to distinguish between benign and malignant pelvic tumors rely on detection of the biomarker cancer antigen 125 (CA125). But this biomarker is limited by poor sensitivity and specificity. In fact, serum CA125 is not elevated in over 20% of ovarian carcinomas and is elevated in a variety of other malignant and non-malignant conditions. While various other tests incorporate other protein biomarkers in addition to CA125, these other tests may perform less adequately than desired and may be more complex than desired. The embodiments described herein enable more reliable prediction of the malignant or benign nature of pelvic (or adnexal) tumors (or masses).

[0318] Objective response rates for immune-oncology therapy are low in malignant melanoma and non-small cell lung cancer patients. Subjects should avoid unnecessary exposure and toxicities if they will not respond to immune-oncology therapy. Thus, in some aspects, the present invention is directed to identifying subjects who are not likely to respond to immune-oncology therapy (such as treatment with pembrolizumab and/or treatment with nivolumab and ipilimumab). In some embodiments the methods provided herein increase the rate of responder to immune-oncology treatments by identifying non-responders. Another advantage of the present method is that it can be used to reduce the cost associated with immune-oncology therapy per indication by avoiding treatment of subjects that are not likely to respond to treatment.

[0319] In some aspects, the present methods employ models and other predictive methods to assess the likelihood of response of a subject to immunotherapy. In some aspects, the methods provided herein have a high sensitivity for non-responders (those that are not likely to respond to immune-oncology therapy). In some aspects, the methods provided herein have a >95%, >97%, >98, or >99% sensitivity for detection of non-responders.

[0320] Provided herein are methods for management of treatment for subjects diagnosed with melanomas. In some embodiments, the subject is diagnosed with advanced melanoma. In some embodiments, the subject is diagnosed with malignant melanoma. In some embodiments, the subject is diagnosed with metastatic melanoma. In some embodiments, the method comprises determining whether the subject is likely to respond to an immunotherapy. In some embodiments, the method comprises determining whether the subject is likely to respond to treatment with pembrolizumab. In some embodiments, the method comprises determining whether the subject is likely to respond to treatment with nivolumab and ipilimumab.

[0321] Provided herein are methods of treating melanoma in a subject comprising administering a treatment to the subject. In some embodiments, the melanoma is advanced melanoma. In some embodiments, the melanoma is malignant melanoma. In some embodiments, the melanoma is metastatic melanoma. In some embodiments, the treatment comprises administering pembrolizumab to the subject. In some embodiments, the treatment comprises administering nivolumab and ipilimumab to the subject.

[0322] In some embodiments, the method comprises determining the likelihood of response of a subject having melanoma to nivolumab plus ipilimumab as a first line therapy. In some embodiments, the method comprises determining the likelihood of response to nivolumab plus ipilimumab as a second line therapy.

[0323] In some embodiments, the method comprises determining the likelihood of response of a subject having non-small cell lung cancer to pembrolizumab as a first line therapy. In some embodiments, the method comprises determining the likelihood of response to pembrolizumab as a second line therapy.

[0324] In some embodiments, the methods provided herein comprises generating a treatment output that predicts a response to an immunoncology therapy (such as pembrolizumab or nivolumab plus ipilimumab) In some embodiments, the predicted response is likely responsive, likely nonresponsive, or indeterminate. In some embodiments, the treatment output is determined based upon the presence, absence, or amount of one or more glycopeptide set forth in Tables A.1-2 or Table B.1-2. In some embodiments, the methods provided herein predict overall survival in subjects with melanoma. In some embodiments, the methods provided herein predict progression free survival in subject with NSCLC.

### 1. Managing Treatment of Melanoma

### I. Overview

[0325] The embodiments described herein recognize that glycoproteomics is an emerging field that can be used in the overall treatment of subjects (e.g., patients) with various types of diseases. Glycoproteomics aims to determine the positions, identities, and quantities of glycans and glycosylated proteins in a given sample (e.g., blood sample, cell, tissue, etc.). Protein glycosylation is one of the most common and most complex forms of post-translational protein modification, and can affect protein structure, conformation, and function. For example, glycoproteins may play crucial roles in important biological processes such as cell signaling, host-pathogen interactions, and immune response and disease. Glycoproteins may therefore be important to treating different types of diseases.

[0326] Although protein glycosylation provides useful information about cancer and other diseases, analysis of protein glycosylation may be difficult as the glycan typically cannot be traced back to the protein site of origin with currently available methodologies. Glycoprotein analysis can be challenging in general due to several reasons. For example, a single glycan composition in a peptide may contain a large number of isomeric structures because of different glycosidic linkages, branching, and many monosaccharides having the same mass. Further, the presence of multiple glycans that share the same peptide sequence may cause the mass spectrometry (MS) signal to split into various glycoforms, lowering their individual abundances compared to the peptides that are not glycosylated (aglycosylated peptides).

[0327] But to understand various disease conditions and more accurately manage the treatment of such disease conditions, such as melanoma, it may be important to perform analysis of glycoproteins and to identify not only the glycan but also the linking site (e.g., the amino acid residue of attachment) within the protein. Thus, there is a need to provide a method for site-specific glycoprotein analysis to obtain detailed information about protein glycosylation patterns which may be able to provide information that can be used to treat diseases, such as melanoma.

[0328] Melanoma is a type of cancer that develops from melanocytes, cells that product pigment. Melanoma may be treated using different types of treatment including, for example, immunotherapies. Such immunotherapies include various types of immune check point inhibitor treatments (e.g., pembrolizumab, nivolumab, ipilimumab) and cytokine therapies (e.g., interferon alpha (IFN-α) and Interleukin 2 (IL-2). Immune check point inhibitors include, for example, anti-cytotoxic T-lymphocyte-associated protein 4 (CTLA-4) monoclonal antibodies (e.g., ipilimumab, tremelimumab), toll-like receptor (TLR) agonists, cluster of differentiation 40 (CD40) agonists, anti-programmed cell death protein 1 (PD-1) (e.g., pembrolizumab, pidilizumab, and nivolumab) and programmed death-ligand 1 (PD-L1) antibodies.

[0329] Different patients may respond differently to different treatments. For example, some patients may have great success with one type of treatment while other patients may have limited or no success with that same treatment. Because melanoma is an aggressive cancer and one of the most serious cancers, subjects may not have the luxury of trying different types of treatments over time. It may be important to identify those subjects who are likely to respond to a given treatment to help avoid the burden associated with adverse events (e.g., events that disrupt a subject's progression-free survival) and to avoid the cost associated with treatment subjects who are not likely to respond to certain treatments. Previous methodologies generally focused on specific mechanisms of drug efficacy of a particular treatment. For example, such methodologies focused on tumor response rather than subject survival. But the embodiments described herein provide ways in which to predict treatment response with respect to survivability for different drugs so that a better selection of treatment may be selected for a subject at the outset.

[0330] Analyzing peptide structure expression in subjects and, in particular, glycopeptide structure abundance may help predict subject response to treatment for melanoma. A peptide structure may be defined by an aglycosylated peptide sequence (e.g., a peptide or peptide fragment of a larger parent protein) or a glycosylated peptide sequence. A glycosylated peptide sequence (also referred to as a glycopeptide structure) may be a peptide sequence having a glycan structure that is attached to a linking site (e.g., an amino acid residue) of the peptide sequence, which may occur via, for example, a particular atom of the amino acid residue). Non-limiting examples of glycosylated peptides include N-linked glycopeptides and O-linked glycopeptides.

[0331] Further, with glycoproteins, there may be too many potential proteoforms to consider. Still further, analysis of peptide structure data in the manner described by the various embodiments herein may be more conducive to accurately predicting treatment response as compared to glycomic analysis that provides little to no information about what proteins and to which amino acid residue sites various glycan structures attach.

[0332] By analyzing which peptide structures are most differentiating between different treatment response classifications of interest (e.g., sustained control and early disruption) for a given treatment and then analyzing a subject's peptide structure profile of those particular peptide structures, a clearer understanding of how that subject will respond to that treatment may be achieved.

[0333] Accordingly, the embodiments described herein provide various methods and systems for analyzing proteins in subjects and, in particular, glycoproteins. In one or more embodiments, methods and systems are provided for treatment management of a subject diagnosed with a melanoma condition. For example, the embodiments described herein provide methods and systems for receiving peptide structure data corresponding to a set of glycoproteins in a biological sample obtained from the subject; computing a treatment score using quantification data identified from the peptide structure data for a set of peptide structures, wherein the set of peptide structures includes at least one peptide structure identified from a plurality of peptide structures listed in Table 55; and generating a treatment output that indicates a predicted response to the treatment for the subject using the treatment score. The predicted response may indicate whether the subject is likely to have sustained control (e.g., no disruption events that might disrupt the subject's progression-free survival within 12 months of treatment) with the treatment or to have early disruption (e.g., one or more disruption events within the first 6 months of treatment).

[0334] The description below provides exemplary implementations of the methods and systems described herein for the research and/or treatment (e.g., designing, planning, administration, etc. of a treatment) of melanoma. Descriptions and examples of various terms, as used herein, are provided in Section II below.

[0335] Objective response rates for pembrolizumab therapy are low in non-small-cell lung cancer patients. Subjects should avoid unnecessary exposure and toxicities if they will not respond to pembrolizumab therapy. Thus, in some aspects, a method described herein is directed to identifying subjects who are not likely to respond to pembrolizumab therapy (such as treatment with pembrolizumab and/or combination therapy with pembrolizumab and chemotherapy). In some embodiments the methods provided herein increase the rate of responder to pembrolizumab therapy by identifying non-responders. Another advantage of the present method is that it can be used to reduce the cost associated with pembrolizumab therapy per indication by avoiding treatment of subjects that are not likely to respond to treatment.

[0336] In some aspects, the present methods employ models and other predictive methods to assess the likelihood of response of a subject to pembrolizumab therapy

[0337] In some embodiments, the method comprises determining the likelihood of response of a subject having non-small-cell lung cancer to pembrolizumab as a first line therapy. In some embodiments, the method comprises determining the likelihood of response to pembrolizumab as a second line therapy.

[0338] In some embodiments, the methods provided herein comprises generating a treatment output that predicts a response to pembrolizumab therapy or combination therapy with pembrolizumab and chemotherapy. In some embodiments, the predicted response is likely responsive, likely nonresponsive, or indeterminate. In some embodiments, the treatment output is determined based upon the presence, absence, or amount of one or more glycopeptide set forth in Table 78. In some embodiments, the methods provided herein predict overall survival in subjects with NSCLC.

1. Biomarkers for Determining Immuno-Oncology response—NSCLC

[0339] Provided herein are methods, devices, glycopeptides, and kits for identifying glycoproteomic biomarkers and signatures for risk of having a disease or a condition, progression of the disease or condition, and response of the disease or condition to a treatment, such as treatment with pembrolizumab for non-small-cell lung cancer. In some cases, the disease or condition may be cancer. In some cases, the progression of the disease or condition includes but is not limited to stage of cancer or size of tumor or a surrogate endpoint. Such information may be used to provide actionable recommendations for treatment to a healthcare provider, including but not limited to initiation of a new treatment, continuation of ongoing treatment, adding a new therapy, or changing the dosage and/or frequency of ongoing treatment.

[0340] Protein glycosylation is one of the abundant and most complex form of post-translational protein modification. Glycosylation profoundly can affect structure, conformation, and function of a polypeptide. The elucidation of the potential role of differential polypeptide glycosylation as biomarkers has so far been limited by the technical complexity of generating and interpreting this information. A novel, powerful platform has been established that combines ultra-high-performance liquid chromatography (LC) coupled to triple quadrupole mass spectrometry (MS) with a machine-learning and neural-network-based data processing engine that allows for high-throughput, highly scalable interrogation of the glycoproteome. The glycoproteomic biomarkers and signatures may be used to predict which cancer patients may respond to pembrolizumab therapy.

[0341] Changes in glycosylation have been described in relationship to disease states such as cancer. See, e.g., Dube, D. H.; Bertozzi, C. R. Glycans in Cancer and Inflammation —Potential for Therapeutics and Diagnostics. Nature Rev. Drug Disc. 2005, 4, 477-88, the entire contents of which are herein incorporated by reference in its entirety for all purposes. However, clinically relevant, non-invasive assays for diagnosing cancer in a patient based on glycosylation changes in a sample from that patient are still needed.

[0342] Mass spectroscopy (MS) offers sensitive and precise measurement of cancer-specific biomarkers including glycopeptides. See, for example, Ruhaak, L. R., et al., Protein-Specific Differential Glycosylation of Immunoglobulins in Serum of Ovarian Cancer Patients DOI: 10.1021/acs.jproteome.5b01071; J. Proteome Res., 2016, 15, 1002-1010 (2016); also Miyamoto, S., et al., Multiple Reaction Monitoring for the Quantitation of Serum Protein Glycosylation Profiles: Application to Ovarian Cancer, DOI: 10.1021/acs.jproteome.7b00541, J. Proteome Res. 2018, 17, 222-233 (2017), the entire contents of which are herein incorporated by reference in its entirety for all purposes. However, using MS to diagnose cancer has not been demonstrated to date in a clinically relevant manner. What is needed are new biomarkers and new methods of using MS to assess a diagnosis for a disease or a condition, a risk of having a disease or a condition, progression of the disease or condition, and response of the disease or condition to a treatment.

### I. Overview—Immuno-Oncology Response to NSCLC

[0343] Described herein are methods for identifying one or more glycopeptide biomarkers predictive of a disease or a condition in a subject, the method comprising: (a) obtaining, by a computer, data of an amount of one or more glycopeptides for a set (n) of subjects, wherein the one or more glycopeptides are generated by fragmenting a glycoprotein in a sample from a subject, the amount of one or more glycopeptides are determined using multiple reaction monitoring mass spectrometry (MRM-MS), and the data for each subject comprises data from samples taken at a plurality of timepoints; (b) selecting, by the computer, a subset of the one or more glycopeptides to include in a predictive model; (c) optimizing, by the computer, the predictive model based on performance of the model for a training subset of the data; (d) generating, by the computer, an outcome score for each subject based on the optimized predictive model; and (e) dichotomizing, by the computer, the outcome scores for each subject at a cutoff outcome score as below or above the cutoff outcome score. In some embodiments, the cutoff outcome score was determined to optimize Harrell's C-index. In some embodiments, the cutoff outcome score was determined to optimize hazard ratio.

[0344] Provided herein are method for identifying one or more peptide or glycopeptide biomarkers predictive of a disease or a condition in a subject, the method comprising: (a) obtaining, by a computer, data of an amount of one or more glycopeptides for a set (n) of subjects, wherein the one or more glycopeptides are generated by fragmenting a glycoprotein in a sample from a subject, the amount of one or more glycopeptides are determined using multiple reaction monitoring mass spectrometry (MRM-MS), and the data for each subject comprises data from samples taken at a plurality of timepoints; (b) selecting, by the computer, a subset of the one or more glycopeptides to include in a predictive model; (c) assessing, by the computer, the predictive model using a cross-validation with n-1 subjects to generate an outcome score for a holdout subject; (d) iterating, by the computer, step (c) for each of n subjects as the holdout subject to generate an outcome score for each subject; (e) dichotomizing, by the computer, the outcome scores for each subject at a cutoff outcome score as below or above the cutoff outcome score; (f) analyzing, by the computer, the amount of one or more glycopeptides for subjects having outcome scores above the cutoff outcome score to the amount of one or more glycopeptides for subjects having outcome scores below the cutoff outcome score for each glycopeptide in the subset of the one or more glycopeptides to determine a hazard ratio and an interaction p-value for each glycopeptide; (g) identifying, by the computer, the glycopeptide having the interaction p-value ≤0.05 as a glycopeptide biomarker for predicting the disease or the condition.

[0345] Described herein are methods for assessing a status of a condition and a treatment in a subject, the method comprising: (a) fragmenting a glycoprotein in a sample from a subject into one or more glycopeptides, wherein the sample comprises one or more of glycoproteins, glycans, or glycopeptides; (b) performing mass spectroscopy (MS) on the one or more glycopeptides using multiple reaction monitoring mass spectrometry (MRM-MS) to quantify an amount of the one or more glycopeptides in the sample, wherein the one or more glycopeptides comprise one or more amino acid sequences selected from a group consisting of SEQ ID NOs: 1002-1008; (c) inputting data of the amount of the one or more glycopeptides into a trained model to generate an output probability, wherein the output probability is indicative of whether a treatment positively influences an outcome of the subject having a condition; and (d) generating a treatment recommendation based on the output probability, wherein the condition is non-small-cell lung cancer (NSCLC) and the treatment comprises checkpoint inhibitors. In some embodiments, the outcome comprises overall survival time. In some embodiments, the treatment comprises pembrolizumab therapy. In some embodiments, the treatment comprises pembrolizumab and chemotherapy. In some embodiments, the recommendation comprises continuing the treatment if the output probability indicates the treatment positively influences the outcome.

[0346] In some embodiments, provided herein are methods for identifying a classification for a sample, the method comprising: quantifying by mass spectroscopy (MS) one or more glycopeptides in a sample wherein the glycopeptides each, individually in each instance, comprises a glycopeptide consisting essentially of an amino acid sequence selected from the group consisting of SEQ ID NO: 1002-1008; and inputting the quantification into a trained model to generate an output probability; determining if the output probability is above or below a threshold for a classification; and identifying a classification for the sample based on whether the output probability is above or below a threshold for a classification.

[0347] In some embodiments, provided herein are methods for training a machine-learning algorithm, comprising: providing a first data set of MRM transition signals indicative of a sample comprising a glycopeptide consisting of, or consisting essentially of, an amino acid sequence selected from the group consisting of SEQ ID NO: 1002-1008; providing a second data set of MRM transition signals indicative of a control sample; and comparing the first data set with the second data set using a machine-learning algorithm.

[0348] In some embodiments, provided herein are methods for determining whether a subject would benefit from pembrolizumab therapy; the method comprising: obtaining a biological sample from the patient; performing mass spectrometry of the biological sample using MRM-MS with a QQQ and/or qTOF spectrometer to detect and quantify one or more glycopeptides consisting essentially of an amino acid sequence selected from the group consisting of SEQ ID NO: 1002-1008; or to detect and quantify one or more MRM transitions; inputting the quantification of the detected glycopeptides or the MRM transitions into a trained model to generate an output probability, determining if the output probability is above or below a threshold for a classification; identifying a diagnostic classification for the patient based on whether the output probability is above or below a threshold for a classification; and providing a recommendation for treatment. In some examples, the method includes performing mass spectroscopy of the biological sample using MRM-MS with a QQQ.

### II. Exemplary Descriptions of Terms

[0349] As used herein the specification, “a” or “an” may mean one or more. As used herein in the claim(s), when used in conjunction with the word “comprising,” the words “a” or “an” may mean one or more than one. Some embodiments of the disclosure may consist of or consist essentially of one or more elements, method steps, and/or methods of the disclosure. It is contemplated that any method or composition described herein can be implemented with respect to any other method or composition described herein and that different embodiments may be combined.

[0350] The use of the term “or” in the claims is used to mean “and/or” unless explicitly indicated to refer to alternatives only or the alternatives are mutually exclusive, although the disclosure supports a definition that refers to only alternatives and “and/or.” For example, “x, y, and/or z” can refer to “x” alone, “y” alone, “z” alone, “x, y, and z,” “(x and y) or z,” “x or (y and z),” or “x or y or z.” It is specifically contemplated that x, y, or z may be specifically excluded from an embodiment. As used herein “another” may mean at least a second or more.

[0351] The term “ones” means more than one.

[0352] As used herein, the term “plurality” may be 2, 3, 4, 5, 6, 7, 8, 9, 10, or more.

[0353] As used herein, the term “set of” means one or more. For example, a set of items includes one or more items.

[0354] As used herein, the phrase “at least one of,” when used with a list of items, means different combinations of one or more of the listed items may be used and only one of the items in the list may be needed. The item may be a particular object, thing, step, operation, process, or category. In other words, “at least one of” means any combination of items or number of items may be used from the list, but not all of the items in the list may be required. For example, without limitation, “at least one of item A, item B, or item C” means item A; item A and item B; item B; item A, item B, and item C; item B and item C; or item A and C. In some cases, “at least one of item A, item B, or item C” means, but is not limited to, two of item A, one of item B, and ten of item C; four of item B and seven of item C; or some other suitable combination.

[0355] As used herein, “substantially” means sufficient to work for the intended purpose. The term “substantially” thus allows for minor, insignificant variations from an absolute or perfect state, dimension, measurement, result, or the like such as would be expected by a person of ordinary skill in the field but that do not appreciably affect overall performance. When used with respect to numerical values or parameters or characteristics that can be expressed as numerical values, “substantially” means within ten percent.

[0356] Throughout this specification, unless the context requires otherwise, the words “comprise”, “comprises” and “comprising” will be understood to imply the inclusion of a stated step or element or group of steps or elements but not the exclusion of any other step or element or group of steps or elements. By “consisting of” is meant including, and limited to, whatever follows the phrase “consisting of” Thus, the phrase “consisting of” indicates that the listed elements are required or mandatory, and that no other elements may be present. By “consisting essentially of” is meant including any elements listed after the phrase, and limited to other elements that do not interfere with or contribute to the activity or action specified in the disclosure for the listed elements. Thus, the phrase “consisting essentially of” indicates that the listed elements are required or mandatory, but that no other elements are optional and may or may not be present depending upon whether or not they affect the activity or action of the listed elements.

[0357] Reference throughout this specification to “one embodiment,” “an embodiment,” “a particular embodiment,” “a related embodiment,” “a certain embodiment,” “an additional embodiment,” or “a further embodiment” or combinations thereof means that a particular feature, structure or characteristic described in connection with the embodiment is included in at least one embodiment of the present invention. Thus, the appearances of the foregoing phrases in various places throughout this specification are not necessarily all referring to the same embodiment. Furthermore, the particular features, structures, or characteristics may be combined in any suitable manner in various embodiments.

[0358] “Treating” or treatment of a disease or condition refers to executing a protocol, which may include administering one or more drugs to a patient, in an effort to alleviate signs or symptoms of the disease. Desirable effects of treatment include decreasing the rate of disease progression, ameliorating or palliating the disease state, and remission or improved prognosis. Alleviation can occur prior to signs or symptoms of the disease or condition appearing, as well as after their appearance. Thus, “treating” or “treatment” may include “preventing” or “prevention” of disease or undesirable condition. In addition, “treating” or “treatment” does not require complete alleviation of signs or symptoms, does not require a cure, and specifically includes protocols that have only a marginal effect on the patient.

[0359] The term “therapeutically effective” as used throughout this application refers to anything that promotes or enhances the well-being of the subject with respect to the medical treatment of this condition. This includes, but is not limited to, a reduction in the frequency or severity of one or more signs or symptoms of a disease, including FLD and including NASH, pancreatic cancer, or breast cancer.

[0360] The term “a stage of NASH” as used herein refers to a period of progression of NASH from successive phases of severity of fibrosis associated with NASH. As used with respect to the samples encompassed herein, the NASH Clinical Research Network fibrosis staging was for stages F1-F4 corresponding to perisinusoidal fibrosis (F1), periportal fibrosis (F2), bridging fibrosis (F3), and cirrhosis (F4).

[0361] The term “F1/F2 stage” as used herein refers to samples or individuals that are either at F1 stage of NASH fibrosis or are at F2 stage of NASH fibrosis.

[0362] The term “F3/F4 stage” as used herein refers to samples or individuals that are either at F3 stage of NASH fibrosis or are at F4 stage of NASH fibrosis.

[0363] The term “early stage” as used herein in association with NASH refers to samples or individuals that are either at F1 stage of NASH fibrosis or are at F2 stage of NASH fibrosis.

[0364] The term “late stage” as used herein in association with NASH refers to samples or individuals that are either at F3 stage of NASH fibrosis or are at F4 stage of NASH fibrosis.

[0365] The term “breast cancer state” or “BC state” as used herein refers to the presence in an individual of breast cancer of any type and of any stage. In various embodiments, it refers to ductal or lobular carcinoma; in situ breast cancer, invasive breast cancer, angiosarcoma, Phyllodes tumor, Paget disease of the breast, and so forth.

[0366] The term “early stage” as used in association with breast cancer herein refers to stage 1 or stage 2 breast cancer.

[0367] The term “pancreatic cancer state” or “PC state” as used herein refers to the presence in an individual of pancreatic cancer of any type and of any stage. In various embodiments, it refers to exocrine pancreatic cancer (including adenocarcinoma (also referred to as ductal carcinoma), squamous cell carcinoma, adenosquamous carcinoma, and colloid carcinoma) and neuroendocrine pancreatic cancer.

[0368] The term “early stage” as used in association with pancreatic cancer herein refers to stage 1 or stage 2 pancreatic cancer.

[0369] The term “amino acid,” as used herein, generally refers to any organic compound that includes an amino group (e.g., —NH2), a carboxyl group (—COOH), and a side chain group (R) which varies based on a specific amino acid. Amino acids can be linked using peptide bonds.

[0370] The term “alkylation,” as used herein, generally refers to the transfer of an alkyl group from one molecule to another. In various embodiments, alkylation is used to react with reduced cysteines to prevent the re-formation of disulfide bonds after reduction has been performed.

[0371] The term “linking site” or “glycosylation site” as used herein generally refers to the location where a sugar molecule of a glycan or glycan structure is directly bound (e.g., covalently bound) to an amino acid of a peptide, a polypeptide, or a protein. For example, the linking site may be an amino acid residue and a glycan structure may be linked via an atom of the amino acid residue. Non-limiting examples of types of glycosylation can include N-linked glycosylation, O-linked glycosylation, C-linked glycosylation, S-linked glycosylation, and glycation. N-linked glycosylation can include a glycan attached to an asparagine. O-linked glycosylation can include a glycan attached to either a serine or a threonine.

[0372] The terms “biological sample,” “biological specimen,” or “biospecimen” as used herein, generally refers to a specimen taken by sampling so as to be representative of the source of the specimen, typically, from a subject. A biological sample can be representative of an organism as a whole, specific tissue, cell type, or category or sub-category of interest. The biological sample can include a macromolecule. The biological sample can include a small molecule. The biological sample can include a virus. The biological sample can include a cell or derivative of a cell. The biological sample can include an organelle. The biological sample can include a cell nucleus. The biological sample can include a rare cell from a population of cells. The biological sample can include any type of cell, including without limitation prokaryotic cells, eukaryotic cells, bacterial, fungal, plant, mammalian, or other animal cell type, mycoplasmas, normal tissue cells, tumor cells, or any other cell type, whether derived from single cell or multicellular organisms. The biological sample can include a constituent of a cell. The biological sample can include nucleotides (e.g., ssDNA, dsDNA, RNA), organelles, amino acids, peptides, proteins, carbohydrates, glycoproteins, or any combination thereof. The biological sample can include a matrix (e.g., a gel or polymer matrix) comprising a cell or one or more constituents from a cell (e.g., cell bead), such as DNA, RNA, organelles, proteins, or any combination thereof, from the cell. The biological sample may be obtained from a tissue of a subject. The biological sample can include a hardened cell. Such hardened cells may or may not include a cell wall or cell membrane. The biological sample can include one or more constituents of a cell but may not include other constituents of the cell. An example of such constituents may include a nucleus or an organelle. The biological sample may include a live cell. The live cell can be capable of being cultured.

[0373] The terms “biological sex” or “sex” or “sex-related” as used herein refer to a subject being a biological male or a biological female, such as having two X chromosomes for a biological female and an X chromosome and a Y chromosome for a biological male. The terms “biological sex” or “sex” or “sex-related” may be referred to as a gender.

[0374] The term “biomarker,” as used herein, generally refers to any measurable substance taken as a sample from a subject whose presence is indicative of some phenomenon. Non-limiting examples of such phenomenon can include a disease state, a condition, or exposure to a compound or environmental condition. In various embodiments described herein, biomarkers may be used for diagnostic purposes (e.g., to diagnose a disease state, a health state, an asymptomatic state, a symptomatic state, etc.). The term “biomarker” may be used interchangeably with the term “marker.”

[0375] The term “chronological age” as used herein may refer to the number of years a person has been alive. More particularly, the “chronological age” as used herein may refer to the number of years a person has been alive at the time of a blood draw.

[0376] The term “predicted age” as used herein may refer to the age of a subject as based on measurements of one or more peptide structures of Table 23. The predicted age may be of a single year, or a range of years, such as a range of 2, 3, 4, 5, 6, 7, 8, 9, 10, or more years.

[0377] The term “denaturation,” as used herein, generally refers to any molecule that loses quaternary structure, tertiary structure, and secondary structure which is present in their native state. Non-limiting examples include proteins or nucleic acids being exposed to an external compound or environmental condition such as acid, base, temperature, pressure, radiation, etc.

[0378] The term “denatured protein,” as used herein, generally refers to a protein that loses quaternary structure, tertiary structure, and secondary structure which is present in their native state.

[0379] The terms “digestion” or “enzymatic digestion,” as used herein, generally refer to breaking apart a polymer (e.g., cutting a polypeptide at a cut site). Proteins may be digested in preparation for mass spectrometry using trypsin digestion protocols. Proteins may be digested using other proteases in preparation for mass spectrometry if access is limited to cleavage sites.

[0380] The terms “immune checkpoint inhibitor therapeutic” and “immune checkpoint inhibitor drug,” as used herein, generally refer to drugs or therapeutics that can target immune checkpoint molecules (e.g., molecules on immune cells that need to be activated (or inactivated) to start an immune response). Non-limiting examples of immune checkpoint inhibitor therapeutics can include pembrolizumab, nivolumab, and cemiplimab.

[0381] The term “disease progression,” as used herein, refers to a progression of a disease from no disease or a less advanced (e.g., severe) form of disease to a more advanced (e.g., severe) form of the disease. A disease progression may include any number of stages of the disease. In various embodiments, the term refers to progression of the stages of NASH including F1, F2, F3, and F4. In particular embodiments, the term refers to progression of F1 to F2, F2 to F3, or F3 to F4. In some embodiments, the term refers to progression of early NASH (being in F1 or F2) to late NASH (being in F3 or F4). In various embodiments, the term refers to progression of a healthy, non-NASH state to any stage of NASH, including F1, F2, F3, F4, early NASH, or late NASH.

[0382] The term “disease state” as used herein, generally refers to a condition that affects the structure or function of an organism. Disease states can include, for example, stages of a disease progression. For example, for FLD, the progression may be from healthy to a stage of fat accumulation and inflammation (Fatty Liver), to non-alcoholic steatohepatitis (NASH), to fibrosis, and to cirrhosis. Disease states can include any state of a disease whether symptomatic or asymptomatic. Disease states can cause minor, moderate, or severe disruptions in the structure or function of a subject.

[0383] The terms “glycan” or “polysaccharide” as used herein, both generally refer to a carbohydrate residue of a glycoconjugate, such as the carbohydrate portion of a glycopeptide, glycoprotein, glycolipid, or proteoglycan. Glycans can include monosaccharides.

[0384] The term “glycopeptide” or “glycopolypeptide” as used herein, generally refer to a peptide or polypeptide comprising at least one glycan residue. In various embodiments, glycopeptides comprise carbohydrate moieties (e.g., one or more glycans) covalently attached to a side chain (i.e. R group) of an amino acid residue.

[0385] The term “glycoprotein,” as used herein, generally refers to a protein having at least one glycan residue bonded thereto. In some examples, a glycoprotein is a protein with at least one oligosaccharide chain covalently bonded thereto. Examples of glycoproteins, include but are not limited to Alpha-1-antitrypsin (A1AT), Alpha-2-macroglobulin (A2MG), apolipoprotein C-III (APOC3), alpha-1-antichymotrypsin (AACT), afamin (AFAM), alpha-1-acid glycoprotein 1 & 2 (AGP12), apolipoprotein B-100 (APOB), apolipoprotein D (APOD), complement C1s subcomponent (C1S), calpain-3 (CAN3), clusterin (CLUS), complement component C8AChain (CO8A), alpha-2-HS-glycoprotein (FETUA), haptoglobin (HPT), Histidine-rich Glycoprotein (HRG), Immunoglobulin heavy constant alpha 1 (IGG1), Immunoglobulin heavy constant alpha 2 (IGG2), immunoglobulin heavy constant gamma 1 (IgG1), immunoglobulin J chain (IgJ), plasma kallikrein (KLKB1), serum paraoxonase/arylesterase 1 (PON1), prothrombin (THRB), serotransferrin (TRFE), protein unc-13 homologA (UN13A), and zinc-alpha-2-glycoprotein (ZA2G). A glycopeptide, as used herein, refers to a fragment of a glycoprotein, unless specified otherwise to the contrary.

[0386] The term “liquid chromatography,” as used herein, generally refers to a technique used to separate a sample into parts. Liquid chromatography can be used to separate, identify, and quantify components.

[0387] The term “mass spectrometry,” as used herein, generally refers to an analytical technique used to identify molecules by measuring a mass-to-charge (m/z) ratio. In various embodiments described herein, mass spectrometry can be involved in characterization and sequencing of proteins as well as to determine the presence, absence and/or abundance or peptides or proteins.

[0388] The term “m/z” or “mass-to-charge ratio” as used herein, generally refers to an output value from a mass spectrometry instrument. In various embodiments, m/z can represent a relationship between the mass of a given ion and the number of elementary charges that it carries. The “m” in m/z stands for mass and the “z” stands for charge. In some embodiments, m/z can be displayed on an x-axis of a mass spectrum.

[0389] The term “peptide,” as used herein, generally refers to amino acids linked by peptide bonds. Peptides can include amino acid chains between 10 and 50 residues. Peptides can include amino acid chains shorter than 10 residues, including, oligopeptides, dipeptides, tripeptides, and tetrapeptides. Peptides can include chains longer than 50 residues and may be referred to as “polypeptides” or “proteins.” As used herein, the phrase “peptide,” is meant to include glycopeptides unless stated otherwise.

[0390] The terms “protein” or “polypeptide” or “peptide” may be used interchangeably herein and generally refer to a molecule including at least three amino acid residues. Proteins can include polymer chains made of amino acid sequences linked together by peptide bonds. Proteins may be digested in preparation for mass spectrometry using trypsin digestion protocols. Proteins may be digested using other proteases in preparation for mass spectrometry if access is limited to cleavage sites. Proteins can include glycoproteins, which are proteins that contain at least one glycan residue bonded thereto.

[0391] The term “peptide structure,” as used herein, generally refers to peptides or a portion thereof or glycopeptides or a portion thereof. In various embodiments described herein, a peptide structure can include any molecule comprising at least two amino acids in sequence. A peptide structure of a glycopeptide includes description of the peptide amino acids sequence as well as the location and identity of the associated glycan.

[0392] The term “reduction,” as used herein, generally refers to the gain of an electron by a substance. In various embodiments described herein, a sugar can directly bind to a protein, thereby, reducing the amino acid to which it binds. Such reducing reactions can occur in glycosylation. In various embodiments, reduction may be used to break disulfide bonds between two cysteines.

[0393] The term “sample,” as used herein, generally refers to a sample from a subject of interest and may include a biological sample of a subject. The sample may include a fluid sample and/or a cell sample. The sample may include a cell line or cell culture sample. The sample can include one or more cells. The sample can include one or more microbes. The sample may include a nucleic acid sample or protein sample. The sample may also include a carbohydrate sample or a lipid sample. The sample may be derived from another sample. The sample may include a tissue sample, such as a biopsy, core biopsy, needle aspirate, or fine needle aspirate. The sample may include a fluid sample, such as a blood sample, urine sample, or saliva sample. The sample may include a skin sample. The sample may include a cheek swab. The sample may include a plasma or serum sample. The sample may include a cell-free or cell free sample. A cell-free sample may include extracellular polynucleotides. The sample may originate from blood, plasma, serum, urine, saliva, mucosal excretions, sputum, stool, or tears. The sample may originate from red blood cells or white blood cells. The sample may originate from feces, spinal fluid, CNS fluid, gastric fluid, amniotic fluid, cyst fluid, peritoneal fluid, marrow, bile, other body fluids, tissue obtained from a biopsy, skin, or hair.

[0394] The term “sequence,” as used herein, generally refers to a biological sequence including one-dimensional monomers that can be assembled to generate a polymer. Non-limiting examples of sequences include nucleotide sequences (e.g., ssDNA, dsDNA, and RNA), amino acid sequences (e.g., proteins, peptides, and polypeptides), and carbohydrates (e.g., compounds including Cₘ(H₂O)ₙ).

[0395] The term “subject,” as used herein, generally refers to an animal, such as a mammal (e.g., human) or avian (e.g., bird), or other organism, such as a plant. For example, the subject can include a vertebrate, a mammal, a rodent (e.g., a mouse), a primate, a simian, or a human. Animals may include, but are not limited to, farm animals, sport animals, and pets. A subject can include a healthy or asymptomatic individual, an individual that has or is suspected of having a disease (e.g., FLD, including NASH) or a pre-disposition to the disease, and/or an individual that needs therapy or suspected of needing therapy. A subject can be a patient. A subject can include a microorganism or microbe (e.g., bacteria, fungi, archaea, viruses). However, in the context of diagnosing ovarian cancer, the subject is female unless explicitly specified otherwise. A subject may be one who has been previously identified as having a disease or a condition, and optionally has already undergone, or is undergoing, a therapeutic intervention for the disease or condition. Alternatively, a subject can also be one who has not been previously diagnosed as having a disease or a condition. For example, a subject can be one who exhibits one or more risk factors for a disease or a condition, or a subject who does not exhibit disease risk factors, or a subject who is asymptomatic for a disease or a condition. A subject can also be one who is suffering from or at risk of developing a disease or a condition.

[0396] The term “training data,” as used herein generally refers to data that can be input into models, statistical models, algorithms and any system or process able to use existing data to make predictions.

[0397] As used herein, a “model” may include one or more algorithms, one or more mathematical techniques, one or more machine learning algorithms, or a combination thereof.

[0398] As used herein, “machine learning” may be the practice of using algorithms to parse data, learn from it, and then make a determination or prediction about something in the world. Machine learning uses algorithms that can learn from data without relying on rules-based programming. A machine learning algorithm may include a parametric model, a nonparametric model, a deep learning model, a neural network, a linear discriminant analysis model, a quadratic discriminant analysis model, a support vector machine, a random forest algorithm, a nearest neighbor algorithm, a combined discriminant analysis model, a k-means clustering algorithm, a supervised model, an unsupervised model, logistic regression model, a multivariable regression model, a penalized multivariable regression model, or another type of model.

[0399] As used herein, an “artificial neural network” or “neural network” (NN) may refer to mathematical algorithms or computational models that mimic an interconnected group of artificial nodes or neurons that processes information based on a connectionistic approach to computation. Neural networks, which may also be referred to as neural nets, can employ one or more layers of nonlinear units to predict an output for a received input. Some neural networks include one or more hidden layers in addition to an output layer. The output of each hidden layer is used as input to the next layer in the network, i.e., the next hidden layer or the output layer. Each layer of the network generates an output from a received input in accordance with current values of a respective set of parameters. In the various embodiments, a reference to a “neural network” may be a reference to one or more neural networks.

[0400] A neural network may process information in two ways: when it is being trained it is in training mode and when it puts what it has learned into practice it is in inference (or prediction) mode. Neural networks learn through a feedback process (e.g., backpropagation) which allows the network to adjust the weight factors (modifying its behavior) of the individual nodes in the intermediate hidden layers so that the output matches the outputs of the training data. In other words, a neural network learns by being fed training data (learning examples) and eventually learns how to reach the correct output, even when it is presented with a new range or set of inputs. A neural network may include, for example, without limitation, at least one of a Feedforward Neural Network (FNN), a Recurrent Neural Network (RNN), a Modular Neural Network (MNN), a Convolutional Neural Network (CNN), a Residual Neural Network (ResNet), an Ordinary Differential Equations Neural Networks (neural-ODE), or another type of neural network.

[0401] As used herein, a “target glycopeptide analyte,” may refer to a peptide structure (e.g., glycosylated or aglycosylated/non-glycosylated), a fraction of a peptide structure, a sub-structure (e.g., a glycan or a glycosylation site) of a peptide structure, a product of one or more of the above listed structures and sub-structures, associated detection molecules (e.g., signal molecule, label, or tag), or an amino acid sequence that can be measured by mass spectrometry. For example, a quadrupole mass analyzer of mass spectrometer can be configured to filter a preselected m/z value that corresponds to a target glycopeptide analyte in an ionized state.

[0402] As used herein, a “peptide data set,” may be used interchangeably with “peptide structure data” and can refer to any data of or relating to a peptide from a resulting mass spectrometry run, an ELISA, or western blot. A peptide data set can comprise data obtained from a sample or biological sample using mass spectrometry. A peptide dataset can comprise data relating to a NGEP external standard, data relating to an internal standard, and data relating to a target glycopeptide analyte of a sample. A peptide data set can result from analysis originating from a single run. In some embodiments, the peptide data set can include raw abundance and mass to charge ratios for one or more peptides.

[0403] As used herein, a “non-glycosylated endogenous peptide” (“NGEP”), which may also be referred to as an aglycosylated peptide, may refer to a peptide structure that does not comprise a glycan molecule. In various embodiments, an NGEP and a target glycopeptide analyte can originate from the same subject. In various embodiments, an NGEP can be labeled with an isotope in preparation for mass spectrometry analysis.

[0404] As used herein, a “transition,” may refer to or identify a peptide structure. In some embodiments, a transition can refer to the specific pair of m/z values associated with a precursor ion and a product or fragment ion.

[0405] As used herein, a “non-glycosylated endogenous peptide” (“NGEP”) may refer to a peptide structure that does not comprise a glycan molecule. In various embodiments, an NGEP and a target glycopeptide analyte may be derived from the same protein sequence. In some embodiments, the NGEP and the target glycopeptide analyte may be derived from or include the same peptide sequence. In various embodiments, a NGEP can be labeled with an isotope in preparation for mass spectrometry analysis.

[0406] As used herein, an “abundance value” may refer to “abundance” or a quantitative value associated with abundance.

[0407] As used herein, “abundance,” may refer to a quantitative value generated using mass spectrometry. In various embodiments, the quantitative value may relate to an amount of a particular peptide structure (e.g., biomarker) present in a biological sample. In some embodiments, the amount may be in relation to other structures present in the sample (e.g., relative abundance). In some embodiments, the quantitative value may comprise an amount of an ion produced using mass spectrometry. In some embodiments, the quantitative value may be associated with an m/z value (e.g., abundance on x-axis and m/z on y-axis). In other embodiments, the quantitative value may be expressed in atomic mass units.

[0408] As used herein, “relative abundance,” may refer to a comparison of two or more abundances. In various embodiments, the comparison may comprise comparing one peptide structure to a total number of peptide structures. In some embodiments, the comparison may comprise comparing one peptide glycoform (e.g., two identical peptides differing by one or more glycans) to a set of peptide glycoforms. In some embodiments, the comparison may comprise comparing a number of ions having a particular m/z ratio by a total number of ions detected. In various embodiments, a relative abundance can be expressed as a ratio. In other embodiments, a relative abundance can be expressed as a percentage. Relative abundance can be presented on a y-axis of a mass spectrum plot.

[0409] As used herein, an “internal standard,” may refer to something that can be contained (e.g., spiked-in) in the same sample as a target glycopeptide analyte undergoing mass spectrometry analysis. Internal standards can be used for calibration purposes. Additionally, internal standards can be used in the systems and method described herein. In some aspects, an internal standard can be selected based on similarity m/z and or retention times and can be a “surrogate” if a specific standard is too costly or unavailable. Internal standards can be heavy labeled or non-heavy labeled. In some instances, the term internal standard can be referred to with the abbreviation ISTD.

[0410] “Healthy” or “normal” as used herein refers to an individual who does not have NSCLC. The individual may have other diseases, disorders, and/or conditions, which may or may not relate to lung cancer.

[0411] “Treatment” refers to a therapeutic intervention that ameliorates a sign or symptom of a disease or pathological condition after it has begun to develop. The term “ameliorating,” with reference to a disease or pathological condition, refers to any observable beneficial effect of the treatment. The beneficial effect can be evidenced, for example, by a delayed onset of clinical symptoms of the disease in a susceptible subject, a reduction in severity of some or all clinical symptoms of the disease, a slower progression of the disease, an improvement in the overall health or well-being of the subject, or by other parameters well known in the art that are specific to the particular disease. A “prophylactic” treatment is a treatment administered to a subject who does not exhibit signs of a disease or exhibits only early signs for the purpose of decreasing the risk of developing pathology.

[0412] The term “fragment,” as used herein, generally refers to an ion fragmentation process which occurs in a MRM-MS instrument. Fragmenting may produce various fragments having the same mass but varying with respect to their charge, e.g., some biomarkers described herein produce more than one product m/z.

[0413] The term “glycopeptide fragment” or “glycosylated peptide fragment” or “glycopeptide” as used herein, generally refers to a glycosylated peptide (or glycopeptide) having an amino acid sequence that is the same as part (but not all) of the amino acid sequence of the glycosylated protein from which the glycosylated peptide is obtained, e.g., ion fragmentation within a MRM-MS instrument. MRM refers to multiple-reaction-monitoring. Unless specified otherwise, within the specification, “glycopeptide fragments” or “fragments of a glycopeptide” refer to the fragments produced directly by using a mass spectrometer optionally after the glycoprotein has been digested enzymatically to produce the glycopeptides.

[0414] The term “patient,” as used herein, generally refers to a mammalian subject. The mammal can be a human, or an animal including, but not limited to an equine, porcine, canine, feline, ungulate, and primate animal. In one embodiment, the individual is a human. The methods and uses described herein are useful for both medical and veterinary uses. A “patient” is a human subject unless specified to the contrary.

[0415] The term “therapeutic” may refer generally to any drug that can be administered to a subject physically (e.g., via oral, intravenous injection, topical treatment, exposure, etc.).

[0416] The terms “determining”, “measuring”, “evaluating”, “assessing,” “assaying,” and “analyzing” are often used interchangeably herein to refer to forms of measurement, and include determining if an element is present or not (for example, detection). These terms can include quantitative, qualitative or quantitative and qualitative determinations. Assessing is alternatively relative or absolute. “Detecting the presence of” includes determining the amount of something present, as well as determining whether it is present or absent.

[0417] As used herein, the terms “cancer” and “cancerous” refer to or describe the physiological condition in a subject that is typically characterized by unregulated cell growth. Examples of cancer include, but are not limited to, melanoma, carcinoma, lymphoma, blastoma, sarcoma, and leukemia and metastases thereof. The term “metastasis” refers to the transference of disease-producing organisms or of malignant or cancerous cells to other parts of the body by way of the blood or lymphatic vessels or membranous surfaces. Non-limiting examples of such cancers include small-cell lung cancer, non-small cell lung cancer, adenocarcinoma of the lung, squamous carcinoma of the lung, melanoma, squamous cell cancer, cancer of the peritoneum, hepatocellular cancer, gastrointestinal cancer, pancreatic cancer, glioblastoma, cervical cancer, ovarian cancer, liver cancer, bladder cancer, hepatoma, breast cancer, colon cancer, colorectal cancer, endometrial or uterine carcinoma, salivary gland carcinoma, kidney cancer, liver cancer, prostate cancer, thyroid cancer, hepatic carcinoma and various types of head and neck cancer.

[0418] As used herein, the phrase “stage of disease” refers to the stages of cancer progression referred to as Stage I, II, III, or IV. Stage of disease indicates if metastasis has occurred in the subject.

[0419] As used herein, the phrase “multiple reaction monitoring mass spectrometry (MRM-MS),” refers to a highly sensitive and selective method for the targeted quantification of glycans and peptides in biological samples. Unlike traditional mass spectrometry, MRM-MS is highly selective (targeted), allowing researchers to fine tune an instrument to specifically look for certain peptides fragments of interest. MRM allows for greater sensitivity, specificity, speed and quantitation of peptides fragments of interest, such as a potential biomarker. MRM-MS involves using one or more of a triple quadrupole (QQQ) mass spectrometer and a quadrupole time-of-flight (qTOF) mass spectrometer.

[0420] As used herein, the phrase “digesting a glycopeptide,” refers to a biological process that employs enzymes to break specific amino acid peptide bonds. For example, digesting a glycopeptide includes contacting a glycopeptide with a digesting enzyme, e.g., trypsin, to produce fragments of the glycopeptide. In some examples, a protease enzyme is used to digest a glycopeptide. The term “protease” refers to an enzyme that performs proteolysis or breakdown of large peptides into smaller polypeptides or individual amino acids. Examples of a protease include, but are not limited to, one or more of a serine protease, threonine protease, cysteine protease, aspartate protease, glutamic acid protease, metalloprotease, asparagine peptide lyase, and any combinations of the foregoing.

[0421] As used herein, the phrase “multiple-reaction-monitoring (MRM) transition,” refers to the mass to charge (m/z) peaks or signals observed when a glycopeptide, or a fragment thereof, is detected by MRM-MS. The MRM transition is detected as the transition of the precursor and product ion.

[0422] As used herein, the phrase “detecting a multiple-reaction-monitoring (MRM) transition,” refers to the process in which a mass spectrometer analyzes a sample using tandem mass spectrometer ion fragmentation methods and identifies the mass to charge ratio for ion fragments in a sample. The absolute value of these identified mass to charge ratios are referred to as transitions. In the context of the methods set forth herein, the mass to charge ratio transitions are the values indicative of glycan, peptide or glycopeptide ion fragments. For some glycopeptides set forth herein, there is a single transition peak or signal. For some other glycopeptides set forth herein, there is more than one transition peak or signal. Background information on MRM mass spectrometry can be found in Introduction to Mass Spectrometry: Instrumentation, Applications, and Strategies for Data Interpretation, 4th Edition, J. Throck Watson, O. David Sparkman, ISBN: 978-O-470-51634-8, November 2007, the entire contents of which are here incorporated by reference in its entirety for all purposes.

[0423] As used herein, the phrase “detecting a multiple-reaction-monitoring (MRM) transition indicative of a glycopeptide,” refers to a MS process in which an MRM-MS transition is detected and then compare to a calculated mass to charge ratio (m/z) of a glycopeptide, or fragment thereof, in order to identify the glycopeptide. In some examples, herein, a single transition may be indicative of two more glycopeptides, if those glycopeptides have identical MRM-MS fragmentation patterns. A transition peak or signal includes, but is not limited to, those transitions set forth herein were are associated with a glycopeptide. A transition peak or signal includes, but is not limited to, those transitions set forth herein are associated with a glycopeptide consisting of an amino acid sequence.

[0424] As used herein, the term “reference value” refers to a value obtained from a population of individual(s) whose disease state is known. The reference value may be in n-dimensional feature space and may be defined by a maximum-margin hyperplane. A reference value can be determined for any particular population, subpopulation, or group of individuals according to standard methods well known to those of skill in the art.

[0425] As used herein, the term “population of individuals” means one or more individuals. In one embodiment, the population of individuals consists of one individual. In one embodiment, the population of individuals comprises multiple individuals. As used herein, the term “multiple” means at least 2 (such as at least 4, 6, 8, 10, 12, 14, 16, 18, 20, 22, 24, 26, 28, or 30) individuals. In one embodiment, the population of individuals comprises at least 10 individuals.

[0426] Glycans are referenced herein using the Symbol Nomenclature for Glycans (SNFG) for illustrating glycans. An explanation of this illustration system is available on the internet at www.ncbi.nlm.nih.gov/glycans/snfg.html, the entire contents of which are herein incorporated by reference in its entirety for all purposes. Symbol Nomenclature for Graphical Representation of Glycans as published in Glycobiology 25: 1323-1324, 2015. Additional information showing illustrations of the SNFG system are. Within this system, the term, Hex_i: is interpreted as follows: i indicates the number of green circles (mannose) and the number of yellow circles (galactose). The term, HexNAC_j, uses j to indicate the number of blue squares (GlcNAC's). The term Fuc_d, uses d to indicate the number of red triangles (fucose). The term NeusAC_1, uses 1 to indicate the number of purple diamonds (sialic acid). The glycan reference codes used herein combine these i, j, d, and 1 terms to make a composite 4-5 number glycan reference code, e.g., 5300 or 5320. See, for example, FIGS. 1 through 14 of PCT Patent Application No. PCT/US2020/0162861, filed Jan. 31, 2020, which are herein incorporated by reference in their entirety for all purposes.

[0427] The term “in vivo” is used to describe an event that takes place in a subject's body.

[0428] The term “ex vivo” is used to describe an event that takes place outside of a subject's body. An “ex vivo” assay is not performed on a subject. Rather, it is performed upon a sample separate from a subject. An example of an “ex vivo” assay performed on a sample is an “in vitro” assay.

[0429] The term “in vitro” is used to describe an event that takes places contained in a container for holding laboratory reagent such that it is separated from the living biological source organism from which the material is obtained. In vitro assays can encompass cell-based assays in which cells alive or dead are employed. In vitro assays can also encompass a cell-free assay in which no intact cells are employed.

### III. Overview of Exemplary Workflow

[0430] FIG. 1 is a schematic diagram of an exemplary workflow 100 for the detection of peptide structures associated with a disease state for use in diagnosis and/or treatment in accordance with various embodiments. Workflow 100 may include various operations including, for example, sample collection 102, sample intake 104, sample preparation and processing 106, data analysis 108, and output generation 110.

[0431] Sample collection 102 may include, for example, obtaining a biological sample 112 of one or more subjects, such as subject 114. Biological sample 112 may take the form of a specimen obtained via one or more sampling methods. Biological sample 112 may be representative of subject 114 as a whole or of a specific tissue, cell type, or other category or sub-category of interest. Biological sample 112 may be obtained in any of a number of different ways. In various embodiments, biological sample 112 includes whole blood sample 116 obtained via a blood draw. In other embodiments, biological sample 112 includes set of aliquoted samples 118 that includes, for example, a serum sample, a plasma sample, a blood cell (e.g., white blood cell (WBC), red blood cell (RBC) sample, another type of sample, or a combination thereof. Biological samples 112 may include nucleotides (e.g., ssDNA, dsDNA, RNA), organelles, amino acids, peptides, proteins, carbohydrates, glycoproteins, or any combination thereof.

[0432] In various embodiments, a single run can analyze a sample (e.g., the sample including a peptide analyte), an external standard (e.g., an NGEP of a serum sample), and an internal standard. As such, abundance values (e.g., abundance or raw abundance) for the external standard, the internal standard, and target glycopeptide analyte can be determined by mass spectrometry in the same run.

[0433] In various embodiments, external standards may be analyzed prior to analyzing samples. In various embodiments, the external standards can be run independently between the samples. In some embodiments, external standards can be analyzed after every 1, 2, 3, 4, 5, 6, 7, 8, 9, 10, 11, 12, 13, 14, 15, 16, 17, 18, 19, 20, or more experiments. In various embodiments, external standard data can be used in some or all of the normalization systems and methods described herein. In additional embodiments, blank samples may be processed to prevent column fouling.

[0434] Sample intake 104 may include one or more various operations such as, for example, aliquoting, registering, processing, storing, thawing, and/or other types of operations. In various embodiments, when biological sample 112 includes whole blood sample 116, sample intake 104 includes aliquoting whole blood sample 116 to form a set of aliquoted samples that can then be sub-aliquoted to form set of samples 120.

[0435] Sample preparation and processing 106 may include, for example, one or more operations to form set of peptide structures 122. In various embodiments, set of peptide structures 122 may include various fragments of unfolded proteins that have undergone digestion and may be ready for analysis.

[0436] Further, sample preparation and processing 106 may include, for example, data acquisition 124 based on set of peptide structures 122. For example, data acquisition 124 may include use of, for example, but is not limited to, a liquid chromatography/mass spectrometry (LC/MS) system.

[0437] Data analysis 108 may include, for example, peptide structure analysis 126. In some embodiments, data analysis 108 also includes output generation 110. Peptide structure analysis can include determining the composition and the associated quantity for the various peptides and glycopeptides present in the sample by processing the output of a mass spectrometer. In other embodiments, output generation 110 may be considered a separate operation from data analysis 108. Output generation 110 may include, for example, generating final output 128 based on the results of peptide structure analysis 126. In various embodiments, final output 128 may be used for determining the research, diagnosis, and/or treatment of a state associated with fatty liver disease or other cancer.

[0438] In various embodiments, final output 128 is comprised of one or more outputs. Final output 128 may take various forms. For example, final output 128 may be a report that includes, for example, a diagnosis output, a treatment output (e.g., a treatment design output, a treatment plan output, or combination thereof), analyzed data (e.g., relativized and normalized) or combination thereof. In some embodiments, the report can comprise a target glycopeptide analyte concentration as a function of the NGEP concentration value and the normalized abundance value. In some embodiments, final output 128 may be an alert (e.g., a visual alert, an audible alert, etc.), a notification (e.g., a visual notification, an audible notification, an email notification, etc.), an email output, or a combination thereof. In some embodiments, final output 128 may be sent to remote system 130 for processing. Remote system 130 may include, for example, a computer system, a server, a processor, a cloud computing platform, cloud storage, a laptop, a tablet, a smartphone, some other type of mobile computing device, or a combination thereof.

[0439] In other embodiments, workflow 100 may optionally exclude one or more of the operations described herein and/or may optionally include one or more other steps or operations other than those described herein (e.g., in addition to and/or instead of those described herein). Accordingly, workflow 100 may be implemented in any of a number of different ways for use in the research, diagnosis, and/or treatment of, for example, FLD.

### IV. Detection and Quantification of Peptide Structures

[0440] FIGS. 2A and 2B are schematic diagrams of a workflow for sample preparation and processing 106 in accordance with various embodiments. FIGS. 2A and 2B are described with continuing reference to FIG. 1. Sample preparation and processing 106 may include, for example, preparation workflow 200 shown in FIG. 2A and data acquisition 124 shown in FIG. 2B.

### IV.A. Sample Preparation and Processing

[0441] FIG. 2A is a schematic diagram of preparation workflow 200 in accordance with various embodiments. Preparation workflow 200 may be used to prepare a sample, such as a sample of set of samples 120 in FIG. 1, for analysis via data acquisition 124. For example, this analysis may be performed via mass spectrometry (e.g., LC-MS). In various embodiments, preparation workflow 200 may include denaturation and reduction 202, alkylation 204, and digestion 206.

[0442] In general, polymers, such as proteins, in their native form, can fold to include secondary, tertiary, and/or other higher order structures. Such higher order structures may functionalize proteins to complete tasks (e.g., enable enzymatic activity) in a subject. Further, such higher order structures of polymers may be maintained via various interactions between side chains of amino acids within the polymers. Such interactions can include ionic bonding, hydrophobic interactions, hydrogen bonding, and disulfide linkages between cysteine residues. However, when using analytic systems and methods, including mass spectrometry, unfolding such polymers (e.g., peptide/protein molecules) may be desired to obtain sequence information. In some embodiments, unfolding a polymer may include denaturing the polymer, which may include, for example, linearizing the polymer.

[0443] In various embodiments, denaturation and reduction 202 can be used to disrupt higher order structures (e.g., secondary, tertiary, quaternary, etc.) of one or more proteins (e.g., polypeptides and peptides) in a sample (e.g., one of set of samples 120 in FIG. 1). Denaturation and reduction 202 includes, for example, a denaturation procedure and a reduction procedure. In some embodiments, the denaturation procedure may be performed using, for example, thermal denaturation, where heat is used as a denaturing agent. The thermal denaturation can disrupt ionic bonding, hydrophobic interactions, and/or hydrogen bonding.

[0444] In various embodiments, the denaturation procedure may include using one or more denaturing agents, temperature (e.g., heat), or both. These one or more denaturing agents may include, for example, but are not limited to, any number of chaotropic salts (e.g., urea, guanidine), surfactants (e.g., sodium dodecyl sulfate (SDS), beta octyl glucoside, Triton X-100), or combination thereof. In some cases, such denaturing agents may be used in combination with heat when sample preparation workflow further includes a cleanup procedure.

[0445] The resulting one or more denatured (e.g., unfolded, linearized) proteins may then undergo further processing in preparation of analysis. For example, a reduction procedure may be performed in which one or more reducing agents are applied. In various embodiments, a reducing agent can produce an alkaline pH. A reducing agent may take the form of, for example, without limitation, dithiothreitol (DTT), tris(2-carboxyethyl)phosphine (TCEP), or some other reducing agent. The reducing agent may reduce (e.g., cleave) the disulfide linkages between cysteine residues of the one or more denatured proteins to form one or more reduced proteins.

[0446] In various embodiments, the one or more reduced proteins resulting from denaturation and reduction 202 may undergo a process to prevent the reformation of disulfide linkages between, for example, the cysteine residues of the one or more reduced proteins. This process may be implemented using alkylation 204 to form one or more alkylated proteins. For example, alkylation 204 may be used to add an acetamide group to a sulfur on each cysteine residue to prevent disulfide linkages from reforming. In various embodiments, an acetamide group can be added by reacting one or more alkylating agents with a reduced protein. The acetamide group or alkylation group that attaches to the protein or peptide results in a different form that is not naturally occurring in nature. The one or more alkylating agents may include, for example, one or more acetamide salts. An alkylating agent may take the form of, for example, iodoacetamide (IAA), 2-chloroacetamide, some other type of acetamide salt, or some other type of alkylating agent.

[0447] In some embodiments, alkylation 204 may include a quenching procedure. The quenching procedure may be performed using one or more reducing agents (e.g., one or more of the reducing agents described above).

[0448] In various embodiments, the one or more alkylated proteins formed via alkylation 204 can then undergo digestion 206 in preparation for analysis (e.g., mass spectrometry analysis). Digestion 206 of a protein may include cleaving the protein at or around one or more cleavage sites (e.g., site 205 which may be one or more amino acid residues). For example, without limitation, an alkylated protein may be cleaved at the carboxyl side of the lysine or arginine residues. This type of cleavage may break the protein into various segments, which include one or more peptide structures (e.g., glycosylated or aglycosylated).

[0449] In various embodiments, digestion 206 is performed using one or more proteolysis catalysts. For example, an enzyme can be used in digestion 206. In some embodiments, the enzyme takes the form of trypsin. In other embodiments, one or more other types of enzymes (e.g., proteases) may be used in addition to or in place of trypsin. These one or more other enzymes include, but are not limited to, LysC, LysN, AspN, GluC, and ArgC. In some embodiments, digestion 206 may be performed using tosyl phenylalanyl chloromethyl ketone (TPCK)-treated trypsin, one or more engineered forms of trypsin, one or more other formulations of trypsin, or a combination thereof. In some embodiments, digestion 206 may be performed in multiple steps, with each involving the use of one or more digestion agents. For example, a secondary digestion, tertiary digestion, etc. may be performed. In various embodiments, trypsin is used to digest serum samples. In various embodiments, trypsin/LysC cocktails are used to digest plasma samples.

[0450] In some embodiments, digestion 206 further includes a quenching procedure. The quenching procedure may be performed by acidifying the sample (e.g., to a pH<3). In some embodiments, formic acid may be used to perform this acidification.

[0451] In various embodiments, preparation workflow 200 further includes post-digestion procedure 207. Post-digestion procedure 207 may include, for example, a cleanup procedure. The cleanup procedure may include, for example, the removal of unwanted components in the sample that results from digestion 206. For example, unwanted components may include, but are not limited to, inorganic ions, surfactants, etc. In some embodiments, post-digestion procedure 207 further includes a procedure for the addition of heavy-labeled peptide internal standards.

[0452] Although preparation workflow 200 has been described with respect to a sample created or taken from biological sample 112 that is blood-based (e.g., a whole blood sample, a plasma sample, a serum sample, etc.), sample preparation workflow 200 may be similarly implemented for other types of samples (e.g., tears, urine, tissue, interstitial fluids, sputum, etc.) to produce set of peptides structures 122.

### IV.B. Peptide Structure Identification and Quantitation

[0453] FIG. 2B is a schematic diagram of data acquisition 124 in accordance with various embodiments. In various embodiments, data acquisition 124 can commence following sample preparation 200 described in FIG. 2A. In various embodiments, data acquisition 124 can comprise quantification 208, quality control 210, and peak integration and normalization 212.

[0454] In various embodiments, targeted quantification 208 of peptides and glycopeptides can incorporate use of liquid chromatography-mass spectrometry LC/MS instrumentation. For example, LC-MS/MS, or tandem MS may be used. In general, LC/MS (e.g., LC-MS/MS) can combine the physical separation capabilities of liquid chromatograph (LC) with the mass analysis capabilities of mass spectrometry (MS). According to some embodiments described herein, this technique allows for the separation of digested peptides to be fed from the LC column into the MS ion source through an interface.

[0455] In various embodiments, LC was performed with gradient elution. The aqueous mobile phase A was 0.1% formic acid in water (vol:vol), and the organic mobile phase B was 0.1% formic acid in acetonitrile (vol:vol). Separation of peptides and glycopeptides was performed using a binary gradient of 0.0-9.0 min, 1-10% B; 9.0-36.0 min, 10-25% B; 36.0-48.0 min, 25-44% B; 48.0-48.1 min, 44-1% B; 48.1-49.0 min, 1% B. The liquid chromatography system can be an Agilent 1290 Infinity II UHPLC system that used a 20 μL loop volume, 4 μL injection volume, Waters ACQUITY UPLC Peptide HSS T3 Column, 100 Å port volume, 1.8 μm particle size, 2.1 mm×150 mm (diameter× length) with HSS T3 guard column, 2.1 mm×5 mm. The output of the chromatography column was either outputted to a waste channel or to the mass spectrometer via an electrospray ionization unit using a microprocessor controlled valve depending on the time of the chromatography run.

[0456] In various embodiments, any LC/MS device can be incorporated into the workflow described herein. In various embodiments, an instrument or instrument system suited for identification and targeted quantification 208 may include, for example, a Triple Quadrupole LC/MS. In various embodiments, targeted quantification 208 is performed using multiple reaction monitoring mass spectrometry (MRM-MS). MRM is a mass spectrometry method in which a precursor ion of a particular m/z (e.g., peptide analyte) is selected in the first quadrupole (Q1) and transmitted to the second quadrupole (Q2) for fragmentation. The resulting product ions are then transmitted to the third quadrupole (Q3), which detects only product ions with selected predefined m/z values. The particular m/z value set for the first quadrupole (Q1) and the selected predefined m/z values of the third quadrupole have a mass range that ranges within +/−1, +/−0.5, or +/−0.1 m/z values.

[0457] In various embodiments described herein, identification of a particular protein or peptide and an associated quantity can be assessed. In various embodiments described herein, identification of a particular glycan and an associated quantity can be assessed. In various embodiments described herein, particular glycans can be matched to a glycosylation site on a protein or peptide and the abundance values measured.

[0458] In some cases, targeted quantification 208 includes using a specific collision energy associated for the appropriate fragmentation to consistently see an abundant product ion. Glycopeptide structures may have a lower collision energy than aglycosylated peptide structures. When analyzing a sample that includes glycopeptide structures, the source voltage and gas temperature may be lowered as compared to generic proteomic analysis.

[0459] In various embodiments, quality control 210 procedures can be put in place to optimize data quality. In various embodiments, measures can be put in place allowing only errors within acceptable ranges outside of an expected value. In various embodiments, employing statistical models (e.g., using Westgard rules) can assist in quality control 210. For example, quality control 210 may include, for example, assessing the retention time and abundance of representative peptide structures (e.g., glycosylated and/or aglycosylated) and spiked-in internal standards, in either every sample, or in each quality control sample (e.g., pooled serum digest).

[0460] Peak integration and normalization 212 may be performed to process the data that has been generated and transform the data into a format for analysis. For example, peak integration and normalization 212 may include converting abundance data for various product ions that were detected for a selected peptide structure into a single quantification metric (e.g., a relative quantity, an adjusted quantity, a normalized quantity, a relative concentration, an adjusted concentration, a normalized concentration, etc.) for that peptide structure. In some embodiments, peak integration and normalization 212 may be performed using one or more of the techniques described in U.S. Patent Publication No. 2020/0372973A1 and/or US Patent Publication No. 2020/0240996A1, the disclosures of which are incorporated by reference herein in their entireties.

### V. Exemplary System for Peptide Structure Data Analysis

### V.A. Analysis System for Peptide Structure Data Analysis

[0461] FIG. 3 is a block diagram of an analysis system 300 in accordance with various embodiments. Analysis system 300 can be used to both detect and analyze various peptide structures that have been associated with breast cancer, pancreatic cancer, various sex-associated biomarkers, various age-associated biomarkers, or various states of FLD. Analysis system 300 is one example of an implementation for a system that may be used to perform data analysis 108 in FIG. 1. Thus, analysis system 300 is described with continuing reference to workflow 100 as described in FIGS. 1, 2A, and/or 2B.

[0462] Analysis system 300 may include computing platform 302 and data store 304. In some embodiments, analysis system 300 also includes display system 306. Computing platform 302 may take various forms. In various embodiments, computing platform 302 includes a single computer (or computer system) or multiple computers in communication with each other. In other examples, computing platform 302 takes the form of a cloud computing platform.

[0463] Data store 304 and display system 306 may each be in communication with computing platform 302. In some examples, data store 304, display system 306, or both may be considered part of or otherwise integrated with computing platform 302. Thus, in some examples, computing platform 302, data store 304, and display system 306 may be separate components in communication with each other, but in other examples, some combination of these components may be integrated together. Communication between these different components may be implemented using any number of wired communications links, wireless communications links, optical communications links, or a combination thereof.

[0464] Analysis system 300 includes, for example, peptide structure analyzer 308, which may be implemented using hardware, software, firmware, or a combination thereof. In various embodiments, peptide structure analyzer 308 is implemented using computing platform 302.

[0465] Peptide structure analyzer 308 receives peptide structure data 310 for processing. Peptide structure data 310 may be, for example, the peptide structure data that is output from sample preparation and processing 106 in FIGS. 1, 2A, and 2B. Accordingly, peptide structure data 310 may correspond to set of peptide structures 122 identified for biological sample 112 and may thereby correspond to biological sample 112.

[0466] Peptide structure data 310 can be sent as input into peptide structure analyzer 308, retrieved from data store 304 or some other type of storage (e.g., cloud storage), accessed from cloud storage, or obtained in some other manner. In some cases, peptide structure data 310 may be retrieved from data store 304 in response to (e.g., directly or indirectly based on) receiving user input entered by a user via an input device.

[0467] Peptide structure data 310 may include quantification data for the plurality of peptide structures. For example, peptide structure data 310 may include a set of quantification metrics for each peptide structure of a plurality of peptide structures. A quantification metric for a peptide structure may be selected as one of a relative quantity, an adjusted quantity, a normalized quantity, a relative abundance, an adjusted abundance, and a normalized abundance. In some cases, a quantification metric for a peptide structure is selected from one of a relative concentration, an adjusted concentration, and a normalized concentration. In this manner, peptide structure data 310 may provide abundance information about the plurality of peptide structures with respect to biological sample 112.

[0468] In various embodiments, peptide structure data 310 may include a set of sex-associated glycosylation biomarkers, and a set of corresponding signals, e.g., the quantification data 316 associated with each of the sex-associated glycosylation biomarkers. The set of corresponding signals, e.g., quantification data 316, is proportional to an amount of each of the sex-associated glycosylation biomarkers in the sample 112. In various embodiments, the set of sex-associated glycosylation biomarkers may include at least one of the sex-associated glycosylation biomarkers listed in Table 28.

[0469] In some embodiments, a peptide structure of set of peptide structures 312 comprises a glycosylated peptide structure, or glycopeptide structure, that is defined by a peptide sequence and a glycan structure attached to a linking site of the peptide sequence. For example, the peptide structure may be a glycopeptide or a portion of a glycopeptide. In some embodiments, a peptide structure of set of peptide structures 312 comprises an aglycosylated peptide structure that is defined by a peptide sequence. For example, the peptide structure may be a peptide or a portion of a peptide and may be referred to as a quantification peptide.

[0470] Set of peptide structures 312 may be identified as being those most predictive or relevant to the symptomatic disease state based on training of model 314. In various embodiments, set of peptide structures 312 includes at least one, at least two, at least three, at least four, at least five, at least six, at least seven, at least eight, at least nine, at least ten, at least 11, at least 12, at least 13, at least 14, at least 15, at least 16, at least 17, at least 18, at least 19, at least 20, at least 21, at least 22, at least 23 at least 24, at least 25, at least 26, at least 27, at least 28, or all 29 of the peptide structures identified in Table 1A. In various embodiments, set of peptide structures 312 includes at least one, at least two, at least three, at least four, at least five, at least six, at least seven, at least eight, at least nine, at least ten, at least 11, at least 12, at least 13, or all of the peptide structures identified in Table 1B. The number of peptide structures selected from Table 1A for inclusion in set of peptide structures 312 may be based on, for example, a desired level of accuracy. In various embodiments, 29 or less peptide structures are selected from Table 1A for inclusion in set of peptide structures 312.

[0471] In Table 1A and 113, “PS-ID No.” identifies a label or index for the peptide structure; “Peptide Structure (PS) Name” identifies a name for the peptide structure; “Prot. SEQ ID NO.” identifies the sequence ID of the protein associated with the peptide structure (e.g., from which the peptide structure is derived); “Pep. SEQ ID No. identifies the peptide SEQ ID NO. for the peptide sequence of the peptide structure; “Monoisotopic mass” identifies the monoisotopic mass of the peptide structure in Daltons (Da); “Linking Site Pos. in Prot. Seq.” identifies the site position with respect to the protein sequence at which the corresponding glycan structure is linked; “Linking Site Pos. in Pep. Seq.” identifies the site position with respect to the peptide sequence at which the corresponding glycan structure is linked; and “GL NO.” identifies a label or index for the corresponding glycan structure. For glycopeptide structures, the name for the peptide structure includes an abbreviation of the protein associated with the peptide structure, a first number that corresponds with the linking site position with respect to the protein sequence of the protein, and a second number that identifies the glycan linked to the protein. For aglycosylated peptide structures, the name for the peptide structure includes an abbreviation of the protein associated with the peptide structure and the corresponding peptide sequence of the peptide structure.

TABLE 1A
Various embodiments of Peptide Structures associated with NASH or
Fibrosis Stage Thereof

| | | | | Linking | Linking | |
|---|---|---|---|---|---|---|
| | | | | Site | Site | |
| | | | | Position | Position | Glycan |
| PS- | | | (Peptide) | within | within | Struct. |
| ID | | (Protein) | SEQ ID | Protein | Peptide | GL |
| NO. | PS-NAME | SEQ ID NO. | NO. | Seq | Sequence | NO. |
| PS- | A1AT_271_5402 | 24 | 1 | 271 | 4 | 5402 |
| 01 | | | | | | |
| PS- | A2MG_1424_5402 | 25 | 2 | 1424 | 3 | 5402 |
| 02 | | | | | | |
| PS- | A2MG_1424_NONG | 25 | 2 | — | — | — |
| 03 | LYCOSYLATED | | | | | |
| PS- | AACT_271_7602 | 26 | 3 | 271 | 4 | 7602 |
| 04 | | | | | | |
| PS- | AGP12_72_7604 | 27 and 28 | 4 | 72 | 15 | 7604 |
| 05 | | | | | | |
| PS- | APOB_3895_5401 | 29 | 5 | 3895 | 9 | 5401 |
| 06 | | | | | | |
| PS- | APOC3_74_1101 | 30 | 6 | 94 | 14 | 1101 |
| 07 | | | | | | |
| PS- | HRG_271_2202 | 31 | 7 | 271 | 1 | 2202 |
| 08 | | | | | | |
| PS- | IGA12_144_4401 | 32 and 33 | 8 | 144 | 18 | 4401 |
| 09 | | | | | | |
| PS- | IGG1_297_5410 | 34 | 9 | 180 | 5 | 5410 |
| 10 | | | | | | |
| PS- | IGG2_297_4411 | 35 | 9 | 176 | 5 | 4411 |
| 11 | | | | | | |
| PS- | IGG2_297_5410 | 35 | 9 | 176 | 5 | 5410 |
| 12 | | | | | | |
| PS- | KLKB1_494MC_54 | 36 | 10 | 494 | 6 | 5402 |
| 13 | 02 | | | | | |
| PS- | ANT3_FATTFYQH | 37 | 11 | — | — | — |
| 14 | LADSK | | | | | |
| PS- | FETUA_346_NONG | 38 | 12 | — | — | — |
| 15 | LYCOSYLATED | | | | | |
| PS- | HEMO_187_5401 | 39 | 13 | 187 | 7 | 5401 |
| 16 | | | | | | |
| PS- | APOB_983_5402 | 29 | 14 | 983 | 16 | 5402 |
| 17 | | | | | | |
| PS- | AGP_93_7604 | 27 | 15 | 93 | 7 | 7604 |
| 18 | | | | | | |
| PS- | KLKB1_453_5402 | 36 | 16 | 453 | 7 | 5402 |
| 19 | | | | | | |
| PS- | CO6_324_5402 | 40 | 17 | 324 | 3 | 5402 |
| 20 | | | | | | |
| PS- | THRB_121_5412 | 41 | 18 | 121 | 4 | 5412 |
| 21 | | | | | | |
| PS- | CFAH_529_5402 | 42 | 19 | 529 | 2 | 5402 |
| 22 | | | | | | |
| PS- | APOD_98_5402 | 43 | 20 | 98 | 16 | 5402 |
| 23 | | | | | | |
| PS- | IGG2_297_3500 | 35 | 9 | 176 | 5 | 3500 |
| 24 | | | | | | |
| PS- | IGG2_176_4500 | 35 | 9 | 176 | 5 | 4500 |
| 25 | | | | | | |
| PS- | FHR1_INHGILYDE | 44 | 21 | — | — | — |
| 26 | EK | | | | | |
| PS- | APOC3_74MC_1102 | 30 | 22 | 94 | 16 | 1102 |
| 27 | | | | | | |
| PS- | AGP1_93_6503 | 27 | 15 | 93 | 7 | 6503 |
| 28 | | | | | | |
| PS- | PLASMAFGA_DSH | 45 | 23 | — | — | — |
| 29 | SLTTNIMEILR | | | | | |

TABLE 1B
Various embodiments of Peptide Structures associated with NASH or Fibrosis Stage Thereof

| | | | | Linking | Linking | |
|---|---|---|---|---|---|---|
| | | | | Site | Site | |
| | | | | Position | Position | |
| | | (Prot) | (Pept) | within | within | Glycan |
| PS- | PS- | SEQ ID | SEQ ID | Protein | Peptide | Struct. |
| ID NO. | NAME | NO. | NO. | Sequence | Sequence | GL NO. |
| PS-01 | A1AT_271_5402 | 24 | 1 | 271 | 4 | 5402 |
| PS-02 | A2MG_1424_5402 | 25 | 2 | 1424 | 3 | 5402 |
| PS-03 | A2MG_1424_NONGLYCOSYLATED | 25 | 2 | — | — | — |
| PS-04 | AACT_271_7602 | 26 | 3 | 271 | 4 | 7602 |
| PS-05 | AGP12_72_7604 | 27 and 28 | 4 | 72 | 15 | 7604 |
| PS-06 | APOB_3895_5401 | 29 | 5 | 3895 | 9 | 5401 |
| PS-07 | APOC3_74_1101 | 30 | 6 | 94 | 14 | 1101 |
| PS-08 | HRG_271_2202 | 31 | 7 | 271 | 1 | 2202 |
| PS-09 | IGA12_144_4401 | 32 and 33 | 8 | 144 | 18 | 4401 |
| PS-10 | IGG1_297_5410 | 34 | 9 | 180 | 5 | 5410 |
| PS-11 | IGG2_297_4411 | 35 | 9 | 176 | 5 | 4411 |
| PS-12 | IGG2_297_5410 | 35 | 9 | 176 | 5 | 5410 |
| PS-13 | KLKB1_494MC_5402 | 36 | 10 | 494 | 6 | 5402 |
| PS-14 | ANT3_FATTFYQHLADSK | 37 | 11 | — | — | — |

Key for Table 1A and 1B and elsewhere herein:
[0472] nonglycosylated: a variant of a glycopeptide that is without glycosylation MC: miscleavage (a peptide of a different length from its counterpart that lacks the MC notation)
[0473] plasma: a fibrinogen peptide that assists in identification whether a sample is plasma or serum (appears in both plasma and serum samples but is upregulated in plasma samples)

[0474] In various embodiments, set of peptide structures 312 includes only peptide structures fragmented from Alpha-1-antitrypsin (A1AT) and thus only A1AT glycoforms. In various embodiments, set of peptide structures 312 includes only peptide structures fragmented from alpha-2-macroglobulin (A2MG) and thus only A2MG glycoforms. In various embodiments, set of peptide structures 312 includes only peptide structures fragmented from the Alpha-1-antichymotrypsin (AACT) and thus only AACT glycoforms. In various embodiments, set of peptide structures 312 includes only peptide structures fragmented from Alpha-1-acid glycoprotein 1 and/or Alpha-1-acid glycoprotein 2 (AGP12) and thus only AGP12 glycoforms. In various embodiments, set of peptide structures 312 includes only peptide structures fragmented from Apolipoprotein B-100 (APOB) and thus only APOB glycoforms. In various embodiments, set of peptide structures 312 includes only peptide structures fragmented from Apolipoprotein C-III (APOC3) and thus only APOC3 glycoforms. In various embodiments, set of peptide structures 312 includes only peptide structures fragmented from Histidine-rich Glycoprotein (HRG) and thus only HRG glycoforms. In various embodiments, set of peptide structures 312 includes only peptide structures fragmented from Immunoglobulin heavy constant alpha 1 and/or 2 (IGA12) and thus only IGA12 glycoforms. In various embodiments, set of peptide structures 312 includes only peptide structures fragmented from Immunoglobulin heavy constant gamma 1 (IGG1) and thus only IGG1 glycoforms. In various embodiments, set of peptide structures 312 includes only peptide structures fragmented from Immunoglobulin heavy constant gamma 2 (IGG2) and thus only IGG2 glycoforms. In various embodiments, set of peptide structures 312 includes only peptide structures fragmented from Plasma Kallikrein (KLKB1) and thus only KLKB1 glycoforms. In various embodiments, set of peptide structures 312 includes only peptide structures fragmented from Antithrombin-III. In some embodiments, set of peptide structures 312 includes only peptide structures fragmented from at least one of A1AT, A2MG, AACT, AGP12, APOB, APOC3, HRG, IGA12 IGG1, IGG2, KLKB1, or Antithrombin-III.

[0475] Peptide structure analyzer 308 includes model 314 that is configured to receive peptide structure data 310 for processing. Model 314 may be implemented in any of a number of different ways. Model 314 may be implemented using any number of models, functions, equations, algorithms, and/or other mathematical techniques.

[0476] In various embodiments, model 314 includes machine learning model 316, which may itself be comprised of any number of machine learning models and/or algorithms. For example, machine learning model 316 may include, without limitation, at least one of a parametric model, a non-parametric model, deep learning model, a neural network, a linear discriminant analysis model, a quadratic discriminant analysis model, a support vector machine, a random forest algorithm, a nearest neighbor algorithm (e.g., a k-Nearest Neighbors algorithm), a combined discriminant analysis model, a k-means clustering algorithm, an unsupervised model, a logistic regression model, a multivariable regression model, a penalized multivariable regression model, or another type of model. In various embodiments, model 314 includes a machine learning model 316 that comprises any number of or combination of the models or algorithms described above.

[0477] In various embodiments, model 312 analyzes peptide structure data 310 for each sample of a cohort to generate a predicted age 324 associated for each sample, where each sample corresponds to a subject and has an associated chronological age or range of ages 315. In various embodiments, peptide structure data 310 may include quantification data 316 for the plurality of peptide structures 314 (also referred to herein as structure markers 314). Quantification data 316 for a peptide structure can include at least one of an abundance, a relative abundance, a normalized abundance, a relative quantity, an adjusted quantity, a normalized quantity, a relative concentration, an adjusted concentration, or a normalized concentration. For example, peptide structure data 310 may include a set of quantification metrics for each peptide structure of a plurality of peptide structures. A quantification metric for a peptide structure may be selected as one of a relative quantity, an adjusted quantity, a normalized quantity, a relative abundance, an adjusted abundance, and a normalized abundance. In some cases, a quantification metric for a peptide structure is selected from one of a relative concentration, an adjusted concentration, and a normalized concentration. In one or more embodiments, the quantification metrics used are normalized abundances. In this manner, peptide structure data 310 may provide abundance information about the plurality of peptide structures with respect to sample 112. Each of the age-associated glycosylation biomarkers of the set can include a precursor m/z value and/or a product ion m/z value.

[0478] In various embodiments, peptide structure data 310 may include a set of age-associated glycosylation biomarkers, and a set of corresponding signals, e.g., the quantification data 316 associated with each of the age-associated glycosylation biomarkers. The set of corresponding signals, e.g., quantification data 316, is proportional to an amount of each of the age-associated glycosylation biomarkers in the sample 112. In various embodiments, the set of age-associated glycosylation biomarkers may include at least one of the age-associated glycosylation biomarkers listed in Table 23.

[0479] In various embodiments, model 314 analyzes the portion (e.g., some or all of) peptide structure data 310 corresponding set of peptide structures 312 to generate disease indicator 318 that classifies biological sample 112 as evidencing a corresponding state of a plurality of states 320 associated with FLD progression. Disease indicator 318 may take various forms. In various embodiments, disease indicator 318 is a score that indicates a classification of the corresponding state for biological sample 112. For example, each of the states 320 may be associated with a different range of values for the score. If the score falls within a selected range associated with a particular state of the states 320, then the score indicates that biological sample 112 evidences that particular state. Thus, the score provides a classification of biological sample 112 as corresponding to that particular state.

[0480] In other embodiments, disease indicator 318 includes a score that indicates a probability that a subject (e.g., subject 114 in FIG. 1) falls within one of the states 320 associated with FLD progression. For example, disease indicator 318 may include one or more scores, each of which may indicate whether biological sample 112 evidences a corresponding state of the states 320 associated with FLD progression. In some examples, disease indicator 318 includes a score for each of the states 320 associated with FLD progression. A higher score indicates a higher probability that biological sample 112 evidences the corresponding state. In various embodiments, states 320 include a NASH state, a non-NASH state, an early stage NASH state, or a late stage NASH state.

[0481] In various embodiments, machine learning model 316 takes the form of regression model 320. Regression model 320 may include, for example, at least one LASSO regression model (or LASSO regularization model) that is trained to compute disease indicator 318. Regression model 320 may be trained to identify weight coefficients for peptide structures of set of peptide structures 312.

[0482] Peptide structure analyzer 308 may generate final output 128 based on disease indicator 318 that is output by model 314. In other embodiments, final output 128 may be an output generated by model 314.

[0483] In some embodiments, final output 128 includes disease indicator 318. In other embodiments, final output 128 includes diagnosis output 324 and/or treatment output 326. Diagnosis output 324 may include, for example, an identification of a classification of which of the states 320 evidenced by biological sample 112 based on disease indicator 318. Treatment output 326 may include, for example, at least one of an identification of a therapeutic to treat the subject, a design for the therapeutic, or a treatment plan for administering the therapeutic. In some embodiments, the therapeutic is an immune checkpoint inhibitor.

[0484] Final output 128 may be sent to remote system 130 for processing in some examples. In other embodiments, final output 128 may be displayed on graphical user interface 328 in display system 306 for viewing by a human operator. The human operator may use final output 128 to diagnose and/or treat subject when final output 128 indicates the subject is positive a state (e.g., NASH or a certain stage thereof) along a disease progression of a disease (e.g., FLD).

[0485] In various embodiments, model 314 analyzes peptide structure data 310 to generate disease indicator 318 that indicates whether the biological sample is positive for a breast cancer (BC) disease state based on set of peptide structures 312 identified as being associated with the BC disease state. Peptide structure data 310 may include quantification data for the plurality of peptide structures. Quantification data for peptide structures can include at least one of an abundance, a relative abundance, a normalized abundance, a relative quantity, an adjusted quantity, a normalized quantity, a relative concentration, an adjusted concentration, or a normalized concentration. For example, peptide structure data 310 may include a set of quantification metrics for each peptide structure of a plurality of peptide structures. A quantification metric for a peptide structure may be selected as one of a relative quantity, an adjusted quantity, a normalized quantity, a relative abundance, an adjusted abundance, and a normalized abundance. In some cases, a quantification metric for a peptide structure is selected from one of a relative concentration, an adjusted concentration, and a normalized concentration. In one or more embodiments, the quantification metrics used are normalized abundances. In this manner, peptide structure data 310 may provide abundance information about the plurality of peptide structures with respect to biological sample 112.

[0486] Disease indicator 318 may take various forms. In some examples, disease indicator 316 includes a classification that indicates whether or not the subject is positive for the BC disease state. In various embodiments, disease indicator 318 can include a score. Score indicates whether the BC disease state is present or not. For example, score may be a probability score that indicates how likely it is that the biological sample 112 evidences the presence of the BC disease state.

[0487] In some embodiments, a peptide structure of set of peptide structures 312 comprises a glycosylated peptide structure, or glycopeptide structure, that is defined by a peptide sequence and a glycan structure attached to a linking site of the peptide sequence quantity. For example, the peptide structure may be a glycopeptide or a portion of a glycopeptide. In some embodiments, a peptide structure of set of peptide structures 312 comprises an aglycosylated peptide structure that is defined by a peptide sequence. For example, the peptide structure may be a peptide or a portion of a peptide and may be referred to as a quantification peptide.

[0488] Set of peptide structures 312 may be identified as being those most predictive or relevant to the BC disease state based on training of model 314. In one or more embodiments, set of peptide structures 312 includes at least 1, at least 2, at least 3, at least 4, at least 5, at least 6, at least 7, at least 8, at least 9, at least 10, at least 11, at least 12, at least 13, at least 14, at least 15, at least 16, at least 17, or all 18 of the peptide structures identified in Table 9 below. In some cases, the number of peptide structures selected from Table 9 for inclusion in set of peptide structures 318 may be based on, for example, a desired level of accuracy.

[0489] In various embodiments, set of peptide structures 312 may be identified as being those most predictive or relevant to the BC disease state based on training of model 314. In one or more embodiments, set of peptide structures 312 includes at least 1, at least 2, at least 3, at least 4, at least 5, at least 6, or all 7 of the peptide structures identified in Table 10A below. In some cases, the number of peptide structures selected from Table 10A for inclusion in set of peptide structures 312 may be based on, for example, a desired level of accuracy.

[0490] In various embodiments, set of peptide structures 312 may be identified as being those most predictive or relevant to the BC disease state based on training of model 314. In one or more embodiments, set of peptide structures 312 includes at least 1, at least 2, at least 3, at least 4, at least 5, at least 6, at least 7, or all 8 of the peptide structures identified in Table 10B below. In some cases, the number of peptide structures selected from Table 10B for inclusion in set of peptide structures 312 may be based on, for example, a desired level of accuracy.

[0491] In one or more embodiments, set of peptide structures 312 includes at least 1, at least 2, at least 3, at least 4, at least 5, at least 6, at least 7, at least 8, at least 9, at least 10, at least 11, at least 12, at least 13, at least 14, at least 15, at least 16, at least 17, or all 18 of the peptide structures PS-30 through PS-47 in Table 9.

[0492] In one or more embodiments, set of peptide structures 312 includes at least 1, at least 2, at least 3, at least 4, at least 5, at least 6, or all 7 of the peptide structures PS-33, PS-42, PS-44, PS-30, PS-47, PS-43, or PS-37 in Table 10A.

[0493] In one or more embodiments, set of peptide structures 312 includes at least 1, at least 2, at least 3, at least 4, at least 5, at least 6, at least 7, or all 8 of the peptide structures PS-42, PS-33, PS-41, PS-43, PS-47, PS-37, PS-30, or PS-45 in Table 10B.

[0494] Set of peptide structures 312 may be identified as being those most predictive or relevant to the PC disease state based on training of model 314. In one or more embodiments, set of peptide structures 312 includes at least 1, at least 2, at least 3, at least 4, at least 5, at least 6, at least 7, at least 8, at least 9, at least 10, at least 11, at least 12, at least 13, at least 14, at least 15, at least 16, at least 17, at least 18, at least 19, at least 20, at least 21, at least 22, at least 23, at least 23, at least 24, at least 25, at least 26, at least 27, at least 28, at least 29, at least 30, at least 31, at least 32, at least 33, at least 34, at least 35, at least 36, at least 37, at least 38, at least 39, at least 40, at least 41, at least 42, at least 43, at least 44, at least 45, at least 46, at least 47, at least 48, at least 49, at least 50, at least 51, at least 52, at least 53, at least 54, or all 55 of the peptide structures identified in Table 16. In some cases, the number of peptide structures selected from Table 16 for inclusion in set of peptide structures 312 may be based on, for example, a desired level of accuracy.

[0495] In various embodiments, set of peptide structures 312 may be identified as being those most predictive or relevant to the PC disease state based on training of model 314. In one or more embodiments, set of peptide structures 312 includes at least 1, at least 2, at least 3, at least 4, at least 5, at least 6, at least 7, at least 8, at least 9, at least 10, at least 11, at least 12, at least 13, at least 14, at least 15, at least 16, at least 17, at least 18, at least 19, at least 20, at least 21, or all 22 of the peptide structures identified in Table 17A below. In some cases, the number of peptide structures selected from Table 17A for inclusion in set of peptide structures 312 may be based on, for example, a desired level of accuracy.

[0496] In various embodiments, set of peptide structures 312 may be identified as being those most predictive or relevant to the PC disease state based on training of model 314. In one or more embodiments, set of peptide structures 312 includes at least 1, at least 2, at least 3, at least 4, at least 5, at least 6, at least 7, at least 8, at least 9, at least 10, at least 11, at least 12, at least 13, at least 14, at least 15, at least 16, at least 17, at least 18, or all 19 of the peptide structures identified in Table 17B below. In some cases, the number of peptide structures selected from Table 17B for inclusion in set of peptide structures 312 may be based on, for example, a desired level of accuracy.

[0497] In various embodiments, set of peptide structures 312 may be identified as being those most predictive or relevant to the PC disease state based on training of model 314. In one or more embodiments, set of peptide structures 312 includes at least 1, at least 2, at least 3, at least 4, at least 5, at least 6, at least 7, at least 8, at least 9, at least 10, at least 11, at least 12, at least 13, at least 14, at least 15, at least 16, or all 17 of the peptide structures identified in Table 17C below in Section VIA. In some cases, the number of peptide structures selected from Table 17C for inclusion in set of peptide structures 312 may be based on, for example, a desired level of accuracy.

[0498] In one or more embodiments, set of peptide structures 312 includes at least 1, at least 2, at least 3, at least 4, at least 5, at least 6, at least 7, at least 8, at least 9, at least 10, at least 11, at least 12, at least 13, at least 14, at least 15, at least 16, at least 17, at least 18, at least 19, at least 20, at least 21, at least 22, at least 23, at least 23, at least 24, at least 25, at least 26, at least 27, at least 28, at least 29, at least 30, at least 31, at least 32, at least 33, at least 34, at least 35, at least 36, at least 37, at least 38, at least 39, at least 40, at least 41, at least 42, at least 43, at least 44, at least 45, at least 46, at least 47, at least 48, at least 49, at least 50, at least 51, at least 52, at least 53, at least 54, or all 55 of the peptide structures PS-48 through PS-102 in Table 16.

[0499] In one or more embodiments, set of peptide structures 312 includes at least 1, at least 2, at least 3, at least 4, at least 5, at least 6, at least 7, at least 8, at least 9, at least 10, at least 11, at least 12, at least 13, at least 14, at least 15, at least 16, at least 17, at least 18, at least 19, at least 20, at least 21, or all 22 of the peptide structures PS-49, PS-50, PS-54, PS-61, PS-63, PS-64, PS-71, PS-79, PS-81, PS-84, PS-86, PS-87, PS-90, PS-91, PS-92, PS-94, PS-95, PS-96, PS-97, PS-98, PS-99, or PS-101 in Table 17A.

[0500] In one or more embodiments, set of peptide structures 312 includes at least 1, at least 2, at least 3, at least 4, at least 5, at least 6, at least 7, at least 8, at least 9, at least 10, at least 11, at least 12, at least 13, at least 14, at least 15, at least 16, at least 17, at least 18, or all 19 of the peptide structures PS-48, PS-52, PS-57, PS-61, PS-62, PS-63, PS-64, PS-69, PS-71, PS-72, PS-73, PS-84, PS-86, PS-88, PS-91, PS-94, PS-96, PS-100, or PS-101 in Table 17B.

[0501] In one or more embodiments, set of peptide structures 312 includes at least 1, at least 2, at least 3, at least 4, at least 5, at least 6, at least 7, at least 8, at least 9, at least 10, at least 11, at least 12, at least 13, at least 14, at least 15, at least 16, or all 17 of the peptide structures PS-48, PS-52, PS-61, PS-64, PS-66, PS-68, PS-69, PS-71, PS-72, PS-73, PS-86, PS-89, PS-91, PS-94, PS-96, PS-99, or PS-101 in Table 17C.

[0502] In various embodiments, machine learning system 316 takes the form of binary classification model. Binary classification model may include, for example, but is not limited to, a regression model. Binary classification model may include, for example, a penalized multivariable regression model that is trained to identify set of peptide structures 312 from a plurality of (or panel of) peptide structures identified in various subjects. Binary classification model may be trained to identify weight coefficients for peptide structures and those peptide structures having non-zero weights or weight coefficients above a selected threshold (e.g., absolute weight coefficient above 0.0, 0.01, 0.05, 0.1, 0.015, 0.2, etc.) may be selected for inclusion in set of peptide structures 312.

[0503] Peptide structure analyzer 308 may generate final output 128 based on disease indicator 318 output by model 314. In other embodiments, final output 128 may be an output generated by model 314.

[0504] In some embodiments, final output 128 includes disease indicator 318. In other embodiments, final output 128 includes diagnosis output 324, treatment output 326, or both. Diagnosis output 324 may include, for example, a diagnosis for the PC disease state. The diagnosis can include a positive diagnosis or a negative diagnosis for the PC disease state. In one or more embodiments, generating diagnosis output 324 may include comparing score to selected threshold to determine the diagnosis. Selected threshold may be, for example, without limitation, (e.g., 0.4, 0.5, 0.6, etc.). For example, when selected threshold is set to 0.5, a score above 0.5 may indicate the presence of the PC disease state and be output in diagnosis output 324 as a positive diagnosis. Treatment output 326 may include, for example, at least one of an identification of a treatment for the subject, a treatment plan for administering the treatment, or both. Treatment for pancreatic cancer may include, for example, but is not limited to, at least one of radiation therapy, chemoradiotherapy, surgery, a targeted drug therapy, or some other form of treatment. The treatment plan may include, for example, but is not limited to, a timeline or schedule for administering the treatment, dosing information, other treatment-related information, or a combination thereof.

[0505] Final output 128 may be sent to remote system 130 for processing in some examples. In other embodiments, final output 128 may be displayed on graphical user interface 328 in display system 306 for viewing by a human operator

[0506] In various embodiments, machine learning system 316 takes the form of binary classification model. Binary classification model may include, for example, but is not limited to, a regression model. Binary classification model may include, for example, a penalized multivariable regression model that is trained to identify set of peptide structures 312 from a plurality of (or panel of) peptide structures identified in various subjects. Binary classification model may be trained to identify weight coefficients for peptide structures and those peptide structures having non-zero weights or weight coefficients above a selected threshold (e.g., absolute weight coefficient above 0.0, 0.01, 0.05, 0.1, 0.015, 0.2, etc.) may be selected for inclusion in set of peptide structures 312.

[0507] Peptide structure analyzer 308 may generate final output 128 based on disease indicator 318 output by model 314. In other embodiments, final output 128 may be an output generated by model 314.

[0508] In some embodiments, final output 128 includes disease indicator 318. In other embodiments, final output 128 includes diagnosis output 324, treatment output 326, or both. Diagnosis output 324 may include, for example, a diagnosis for the BC disease state. The diagnosis can include a positive diagnosis or a negative diagnosis for the BC disease state. In one or more embodiments, generating diagnosis output 324 may include comparing score to selected threshold to determine the diagnosis. Selected threshold may be, for example, without limitation, (e.g., 0.4, 0.5, 0.6, etc.). For example, when selected threshold 328 is set to 0.5, a score 320 above 0.5 may indicate the presence of the BC disease state and be output in diagnosis output 324 as a positive diagnosis. Treatment output 326 may include, for example, at least one of an identification of a treatment for the subject, a treatment plan for administering the treatment, or both. Treatment for breast cancer may include, for example, but is not limited to, at least one of radiation therapy, chemoradiotherapy, surgery, a targeted drug therapy, or some other form of treatment. The treatment plan may include, for example, but is not limited to, a timeline or schedule for administering the treatment, dosing information, other treatment-related information, or a combination thereof. In various embodiments, the set of peptide structures 314 may include a set of biomarkers identified as being those most relevant to predicting a biological age or range of age of one or more subjects from whom the sample(s) was taken. In one or more embodiments, set of peptide structures 314 includes at least one, at least two, or at least three peptide structures from a first group of peptide structures (peptide structures PS-103 through PS-122) identified in Table 23. For example, in one or more embodiments, set of peptide structures 314 includes at least 1, at least 2, at least 3, at least 4, at least 5, at least 6, at least 7, at least 8, at least 9, at least 10, at least 11, at least 12, at least 13, at least 14, at least 15, at least 16, at least 17, at least 18, at least 19, or all 20 of the peptide structures identified in Table 23. In some cases, the number of peptide structures selected from Table 23 for inclusion in the set of peptide structures 314 may be based on, for example, a desired level of accuracy.

[0509] In various embodiments, principal component analysis (PCA) 318 can be performed to determine most relevant biomarkers from the set of peptide structures 314. Principal Component Analysis (PCA) is a mathematical technique used to describe the variance in the dataset with a relatively small number of Principal Components vectors (PCs). In various embodiments, principal component analysis 318 may be performed to determine one or more PCA features for each glycopeptide group of the set of peptide structures 314. A glycopeptide group can have a plurality of glycoforms where each glycoform has the same peptide sequence with a different glycan structure attached to the same amino acid location within the peptide sequence. A set of glycopeptide groups can represent various peptide sequences and their associated glycoforms. The PCA features are vectors explaining the variance across the various glycoforms for a glycopeptide amino acid site. PCA can be performed for a plurality of proteins typically found in a biological sample like serum. After performing PCA on glycopeptide site level features (i.e., glycopeptide group_, a set of three Principle components vector features for each glycopeptide site that are used to perform further downstream analysis. The PCA feature vectors are extracted taking into consideration the concentration values of all unique glycopeptide sites and the group of glycoforms associated with that specific site. For example, a “specific site” is in reference to the amino acid residue at which the glycan is attached. The “specific site” can have a different type of attached glycan structure, where in many instances there can be 3 or more glycoforms. PCA can be used to collapse that information across all N dimensions into 3 PC's per site, that represent the top three axes of independent information. For example, a group of glycoforms can be represented by the protein CFAH where the glycans attach at a specific amino acid site 1029 (with respect to the UniProt protein sequence) and there are three possible glycans that can attach to the specific site 1029 (e.g., glycan 5401, 5402, and 5412). For example, the first three PC vectors which explain the largest variance for a group of glycoforms for a specific glycopeptide site can be extracted. Each PC vector is a statistical measure of variation explained at a specific glycosylation site starting from PC1 being the highest explained variation to PC3 being the lowest. The table below lists PC vectors that are generated after performing PCA on each glycopeptide site and the glycoforms associated with that site. In one embodiment, PCA analysis was performed on a plurality of glycopeptide groups that resulted in one to three PC vectors for each glycopeptide group. For example, three vectors for one glycopeptide group (where the peptide is part of the protein CFAH and that various glycoforms are attached at amino acid position 1029) could be represented by PC1_1029_CFAH, PC2_1029_CFAH, PC3_1029_CFAH where the terms:
[0510] PC1 represents—principal component 1 vector
[0511] PC2 represents—principal component 2 vector
[0512] PC3 represents—principal component 3 vector. The term PC vector may also be referred to as a PCA feature.

[0513] As noted above, PCA features were determined with a PCA analysis on a plurality of glycopeptide groups. In various embodiments, linear regression was performed with the PCA features and the chronological age for each of the samples. In various embodiments, the set of the PCA features that have significant values below a certain threshold value. A list of all the PC vector features that are significant with a p-value of less than 0.05 are as follows: PC3_297_IGG1; PC3_297_IGG2; PC1_352_IC1; PC1_128_ZA2G; PC3_205_IGA2; PC3_72_AGP12; PC3_144_IGA12; PC2_253_IC1; PC2_144MC_IGA12; PC2_630_TRFE; PC3_138_CERU; and PC3_209_IGM. In various embodiments, statistically significant values for each of the PCA features may be an output of the linear regression.

[0514] A list of 12 glycopeptide groups were found to be significant (p<0.05). By accounting for the various glycoforms for each of the 12 glycopeptide groups (297_IGG1; 297_IGG2; 352_IC1; 128_ZA2G; 205_IGA2; 72_AGP12; 144_IGA12; 253_IC1; 144MC_IGA12; 630_TRFE; 138_CERU; and 209_IGM), a total of 20 glycopeptide biomarkers were identified that can be used for logistic regression modeling via model learning system 320.

[0515] In various embodiments, machine learning system 320 can be trained using one or more glycopeptides for each glycopeptide group of the selected set of the one or more PCA features and the chronological age for each sample. In various embodiments, machine learning system 320 can be tested using another cohort of samples, which can generate predicted age values and compare against the chronological age values of that cohort of samples for validation.

[0516] In various embodiments, machine learning system 320 takes the form of binary classification model 322. Binary classification model 322 may include, for example, but is not limited to, a regression model. Binary classification model 322 may include, for example, a penalized multivariable regression model that is trained to identify a set of peptide structures 314 from a plurality of (or panel of) peptide structures identified in various subjects. Binary classification model 322 may be trained to identify weight coefficients for peptide structures and those peptide structures having non-zero weights or weight coefficients above a selected threshold (e.g., absolute weight coefficient above 0.0, 0.01, 0.05, 0.1, 0.015, 0.2, etc.) may be selected for inclusion in set of peptide structures 314.

[0517] In various embodiments, machine learning system 320 may include multiplying the corresponding signal, e.g., quantification data 316, associated with age-associated glycosylation biomarkers and a respective coefficient for each sample of the cohort to form a plurality of products. In various embodiments, machine learning system 320 may include summing together the plurality of products to form a summation, and then adding the summation and the intercept to form an output value, where the output value is proportional to the predicted age for the sample.

[0518] In various embodiments, machine learning system 320 may include multiplying the corresponding signal, e.g., quantification data 316, associated with sex-associated glycosylation biomarkers and a respective coefficient for each sample of the cohort to form a plurality of products. In various embodiments, machine learning system 320 may include summing together the plurality of products to form a summation, and then adding the summation and the intercept to form an output value, where the output value is greater than a first threshold to determine a sex associated with the sample or subject such as male or female.

[0519] In various embodiments, machine learning system 320 may include an equation to determine an output value as follows:

$$O V = {\sum }_{i = 1}^{i = 20} [ ( {Signal}_{SEQ ID No : i} ) \times ( {Coefficient}_{SEQ ID No : i} ) ] + Intercept$$

$$where O V = an output value ,$$

$$i = an index number for each of the age - associated glycosylation biomarkers ,$$

$${Signal}_{SEQ ID No : i} = a corresponding signal or quantification data associated with the age - associated glycosylation biomarker i , and$$

$${Coefficient}_{SEQ ID No : i} = a coefficient associated with the age - associated glycosylation biomarker i .$$

[0520] In various embodiments, peptide structure analyzer 308 may generate final output 128 based on the PCA features 319 output by model 312. In other embodiments, final output 128 may be an output generated by model 312. In some embodiments, final output 128 includes PCA features 319. In various embodiments, final output 128 includes a predicted age 324. In various embodiments, final output 128 includes a correlation coefficient 328. In various embodiments, correlation coefficient 328 is a Pearson correlation coefficient where the predicted age 324 is a continuous variable and the chronological age 315 is another continuous variable. The Pearson correlation coefficient (r_{xy}) can be determined using the following equation:

$${r}_{xy} = \frac{{\sum }_{i = 1}^{n} ( {x}_{i} - \overline{x} ) ( {y}_{i} - \overline{y} )}{\sqrt{{\sum }_{i = 1}^{n} {( {x}_{i} - \overline{x} )}^{2}} \sqrt{{\sum }_{i = 1}^{n} {( {y}_{i} - \overline{y} )}^{2}}}$$

$$where n = a number of the samples in the cohort ,$$

$$i = an index number for each of the samples ,$$

$${x}_{i} = a chronological age for sample i ,$$

$$\overline{x} = a mean chronological age ,$$

$${y}_{i} = a predicted age for sample i , and$$

$$\overline{y} = a mean predicted age .$$

[0521] In various embodiments, correlation coefficient 328 determined based on the predicted age 324 and the chronological age 315 for each sample can help identify a quality control issue associated with the chronological age provided with the sample. For example, if correlation coefficient 328 does not fall within a predetermined range of values 326, final output 128 can include a quality control issue associated with the chronological age for the cohort or that particular batch of samples. In various embodiments, the predetermined range of values 326 can range from about 0 to about 0.2. In various embodiments, the quality control issue identified as final output 128 can include, for example, an error of mislabeled samples or an error from sample preparation, or a systemic measurement or an instrument error, or a combination thereof.

[0522] In various embodiments, machine learning system 320 may include multiplying the corresponding signal, e.g., quantification data 316, associated with sex-associated glycosylation biomarkers and a respective coefficient for each sample of the cohort to form a plurality of products. In various embodiments, machine learning system 320 may include summing together the plurality of products to form a summation, and then adding the summation and the intercept to form an output value, where the output value is greater than a first threshold to determine a sex associated with the sample or subject such as male or female.

[0523] In various embodiments, machine learning system 320 may include an equation to determine an output value as follows:

$$O V = {\sum }^{i = 42} \qquad {SEQ ID No : i}_{} \qquad {SEQ ID No : i}_{}$$

$$where O V = an output value ,$$

$$i = an index number for each of the sex - associated glycosylation biomarkers ,$$

$${SEQ ID No : i}_{} = a corresponding signal or quantification data associated with the sex - associated glycosylation biomarker i , and$$

$${SEQ ID No : i}_{} = a coefficient associated with the sex - associated glycosylation biomarker i .$$

[0524] In various embodiments, the above OV equation can be used as model 312 that uses quantification data 316 for calculating the output value OV, In one embodiment, the subject or sample can be estimated to have the sex of male when the output value OV is greater than a first threshold and the subject or sample can be estimated to have the sex of female when the output value OV is less than the first threshold. In various embodiments, the OV can be a probability value and where the probability is less than or equal to 0.5 (e.g., first threshold), a binary classification method can then output a 0 that corresponds to a male. Similarly, where the probability is greater than 0.5, the binary classification method can then output a 1 that corresponds to a female.

[0525] In various embodiments, peptide structure analyzer 308 may generate final output 128 based on the PCA features 319 output by model 312. In other embodiments, final output 128 may be an output generated by model 312. In some embodiments, final output 128 includes PCA features 319. In various embodiments, final output 128 includes a predicted sex 324. In various embodiments, final output 128 includes an accuracy score 327.

[0526] In various embodiments, accuracy score 327 can be determined based on the predicted sex 324 and the annotated sex 315 for each sample. For example, the accuracy score can be based on a ratio of the number of samples of a cohort that had the same gender for predicted sex and annotated sex and the total number of samples of the cohort. More particularly, the accuracy score can be the number of samples of a cohort that had the same gender for the predicted sex and annotated sex divided by the total number of samples of the cohort. In various embodiments, the determined accuracy score 327 can help identify a quality control issue associated with the annotated sex provided with the sample. For instance, when the determined accuracy score 327 is less than a threshold value (e.g., 0.5), then a quality control issue can be provided for the analysis of the cohort that may be related to a mistake in inputting the gender for one or more subjects. For example, depending on the accuracy score 327, final output 128 can include a quality control issue associated with the annotated sex for the cohort or that particular batch of samples. In various embodiments, the quality control issue identified as final output 128 can include, for example, an error of mislabeled samples or an error from sample preparation, or a systemic measurement or an instrument error.

[0527] In various embodiments, final output 128 includes the sensitivity score 328 and/or the specificity score 329. In various embodiments, the sensitivity score 328 and/or the specificity score 329 can be determined based on the predicted sex 324 and the annotated sex 315 for each sample in the cohort. In various embodiments, the determined sensitivity score 328 and specificity score 329 illustrate the overall performance of the model in regard to the true positive rate and the true negative rate, respectively.

### V.B. Analysis System for Peptide Structure Data Analysis for Diagnosis of NSCLC

[0528] FIG. 3 is a block diagram of an analysis system 300, in accordance with the presently disclosed embodiments. For example, in accordance with the presently disclosed embodiments, the analysis system 300 may include any computing platform that may be utilized for performing one or more methods of classifying a biological sample obtained from a subject with respect to a plurality of states associated with NSCLC, detecting the presence of one of a plurality of states associated with NSCLC, treating NSCLC in a subject, determining techniques for treating NSCLC in a subject, diagnosing an individual with NSCLC, and training a model to diagnose a subject with one of a plurality of states associated with NSCLC, in accordance with the presently disclosed embodiments. Analysis system 300 can be used to detect and analyze various peptide structures that have been associated with various states of NSCLC. Analysis system 300 is one example of an implementation for a system that may be used to perform data analysis 108. Analysis system 300 may include computing platform 302 and data store 304.

[0529] In certain embodiments, analysis system 300 may also include display system 306. Computing platform 302 may take various forms. In certain embodiments, computing platform 302 may include a single computer (or computer system) or multiple computers in communication with each other. In other examples, computing platform 302 takes the form of a cloud computing platform. Data store 304 and display system 306 may each be in communication with computing platform 302. In some examples, data store 304, display system 306, or both may be considered part of or otherwise integrated with computing platform 302. Thus, in some examples, computing platform 302, data store 304, and display system 306 may be separate components in communication with each other, but in other examples, some combination of these components may be integrated together. Communication between these different components may be implemented using any number of wired communications links, wireless communications links, optical communications links, or a combination thereof.

[0530] In certain embodiments, analysis system 300 may include, for example, peptide structure analyzer 308, which may be implemented using hardware, software, firmware, or a combination thereof. In certain embodiments, peptide structure analyzer 308 is implemented using computing platform 302. Peptide structure analyzer 308 receives peptide structure data 310 for processing. Peptide structure data 310 may be, for example, the peptide structure data that is output from sample preparation and processing 106 in FIG. 1, FIG. 2A, and FIG. 2B. Accordingly, peptide structure data 310 may correspond to set of peptide structures 122 identified for biological sample 112 and may thereby correspond to biological sample 112. Peptide structure data 310 can be sent as input into peptide structure analyzer 308, retrieved from data store 304 or some other type of storage (e.g., cloud storage), accessed from cloud storage, or obtained in some other manner. In some cases, peptide structure data 310 may be retrieved from data store 304 in response to (e.g., directly or indirectly based on) receiving user input entered by a user via an input device. Peptide structure data 310 may include quantification data for the plurality of peptide structures. For example, peptide structure data 310 may include a set of quantification metrics for each peptide structure of a plurality of peptide structures. A quantification metric for a peptide structure may be selected as one of a relative quantity, an adjusted quantity, a normalized quantity, a relative abundance, an adjusted abundance, and a normalized abundance. In some cases, a quantification metric for a peptide structure is selected from one of a relative concentration, an adjusted concentration, and a normalized concentration. In this manner, peptide structure data 310 may provide abundance information about the plurality of peptide structures with respect to biological sample 112.

[0531] In certain embodiments, a peptide structure of set of peptide structures 312 may include a glycosylated peptide structure, or glycopeptide structure, that is defined by a peptide sequence and a glycan structure attached to a linking site of the peptide sequence. For example, the peptide structure may be a glycopeptide or a portion of a glycopeptide. In certain embodiments, a peptide structure of set of peptide structures 312 may include an aglycosylated peptide structure that is defined by a peptide sequence. For example, the peptide structure may be a tag glycopeptide or a portion of a tag glycopeptide and may be referred to as a quantification peptide. A tag peptide can be a peptide with at least one isotopically labeled amino acid. Set of peptide structures 312 may be identified as being those most predictive or relevant to the symptomatic disease state based on training of model 314. In certain embodiments, set of peptide structures 312 may include at least one, at least two, at least three, at least four, at least five, at least 10, at least 15, at least 20, at least 25, or all of the peptide structures identified in Table 35 below. The number of peptide structures selected from Table 35 for inclusion in set of peptide structures 312 may be based on, for example, a desired level of accuracy. In certain embodiments, an N number of peptide structures may be selected from Table 35 for inclusion in set of peptide structures 312, in which Nis an integer from 1-73. In certain embodiments, set of peptide structures 312 may include at least one, at least two, at least three, at least four, at least five, at least 10, at least 15, or all of the peptide structures identified in Table 40 below. The number of peptide structures selected from Table 40 for inclusion in set of peptide structures 312 may be based on, for example, a desired level of accuracy. In certain embodiments, an N number of peptide structures may be selected from Table 35 for inclusion in set of peptide structures 312, in which Nis an integer from 1-19.

[0532] Peptide structure analyzer 308 may include model 314 that may be able to receive peptide structure data 310 for processing. Model 314 may be implemented in any of a number of different ways. Model 314 may be implemented using any number of models, functions, equations, algorithms, and/or other mathematical techniques. In certain embodiments, model 314 may include one or more machine-learning systems 316, which may include any number of machine-learning models and/or algorithms. For example, machine-learning systems 316 may include, without limitation, at least one of a parametric model, a non-parametric model, deep learning model, a neural network, a linear discriminant analysis model, a quadratic discriminant analysis model, a support vector machine, a random forest algorithm, a nearest neighbor algorithm (e.g., a k-Nearest Neighbors algorithm), a combined discriminant analysis model, a k-means clustering algorithm, a supervised machine-learning model, an unsupervised machine-learning model, a logistic regression model, a univariate regularized regression model (e.g., a univariate least absolute shrinkage and selection operator (LASSO) regression model), a multivariate regularized regression model (e.g., a multivariate LASSO regression model), a penalized univariate regularized regression model (e.g., a penalized univariate LASSO regression model), a penalized multivariate regularized regression model (e.g., a penalized multivariate LASSO regression model), or any of various other models that may be utilized to predict the presence and/or absence of NSCLC in a subject, in accordance with the presently-disclosed embodiments. In certain embodiments, model 314 may include machine-learning systems 316, which may include any number of or combination of the models or algorithms described above.

[0533] In certain embodiments, model 314 analyzes the portion (e.g., some or all of) peptide structure data 310 corresponding set of peptide structures 312 to generate disease indicator 318 that classifies biological sample 112 as evidencing a corresponding state of a plurality of states 320 associated with NSCLC. Disease indicator 318 may take various forms. In certain embodiments, disease indicator 318 is a score that indicates a classification of the corresponding state for biological sample 112. In certain embodiments, the classification of the corresponding state for biological sample 112 may be a binary classification (e.g., a prediction score of 0.8, 0.9, or otherwise approximately “1.0” may indicate an NSCLC state, while a prediction score of 0.1., 0.2., otherwise approximately “0.0” may indicate a healthy state). Thus, in accordance with the presently-disclosed embodiments, the disease indicator 318 may simply indicate whether a subject has NSCLC or does not have NSCLC based on the peptide structure data 310.

[0534] In certain embodiments, disease indicator 318 may include a score that indicates a probability that a subject (e.g., subject 114 in FIG. 1) falls within one of the states 320 associated with NSCLC. For example, disease indicator 318 may include one or more scores, each of which may indicate whether biological sample 112 has one of the corresponding states 320 associated with NSCLC. In some examples, disease indicator 318 may include a score for each of the states 320 associated with NSCLC. For example, as generally noted above, the states 320 associated with NSCLC may include a binary classification, in which, for example, the machine-learning systems 316 may generate prediction value of 0.8, 0.9, or otherwise approximately “1.0” to indicate the presence of NSCLC and may generate prediction value of 0.1, 0.2, otherwise approximately “0.0” to indicate the absence of NSCLC (e.g., a healthy). In certain embodiments, machine-learning systems 316 may include regularized regression model (e.g., a univariate regularized regression model or a multivariate regularized regression model). For example, in one embodiment, the regularized regression may include a LASSO regression model (e.g., a univariate LASSO regression model or a multivariate LASSO regression model) trained to compute disease indicator 318. In another embodiment, the regularized regression model may be trained to, for example, classify a biological sample obtained from a subject with respect to a plurality of states associated with NSCLC, detect the presence of one of a plurality of states associated with NSCLC; determine techniques for treating NSCLC in a subject; and determine techniques for diagnosing an individual with NSCLC, in accordance with the presently disclosed embodiments. The regularized regression model may be trained to identify weight coefficients for peptide structures of set of peptide structures 312. Peptide structure analyzer 308 may generate final output 128 based on disease indicator 318 that is output by model 314. In other embodiments, final output 128 may be an output generated by model 314.

[0535] In certain embodiments, final output 128 may include disease indicator 318. In other embodiments, final output 128 may include diagnosis output 324 and/or treatment output 326. Diagnosis output 324 may include, for example, an identification of a classification of which of the states 320 evidenced by biological sample 112 based on disease indicator 318. Treatment output 326 may include, for example, at least one of an identification of a therapy to treat the subject, a design for the therapy, or a treatment plan for administering the therapy. In certain embodiments, the therapy is a surgery, a chemotherapeutic therapy, a patient-specific therapy, a targeted immunotherapy, a radiation procedure, a radiofrequency ablation (RFA) procedure, or a combination thereof. Final output 128 may be sent to remote system 130 for processing in some examples. In other embodiments, final output 128 may be displayed on graphical user interface 328 in display system 306 for viewing by a human operator. The human operator may use final output 128 to diagnose and/or treat the subject when final output 128 indicates the subject has NSCLC.

### V.C. Analysis System for Peptide Structure Data Analysis for Diagnosis of Ovarian Cancer

[0536] FIG. 3 is a block diagram of an analysis system 300 in accordance with one or more embodiments. Analysis system 300 can be used to both detect and analyze various peptide structures that have been associated to various disease states. Analysis system 300 is one example of an implementation for a system that may be used to perform data analysis 108 in FIG. 1. Thus, analysis system 300 is described with continuing reference to workflow 100 as described in FIGS. 1, 2A, and/or 2B.

[0537] Analysis system 300 may include computing platform 302 and data store 304. In some embodiments, analysis system 300 also includes display system 306. Computing platform 302 may take various forms. In one or more embodiments, computing platform 302 includes a single computer (or computer system) or multiple computers in communication with each other. In other examples, computing platform 302 takes the form of a cloud computing platform.

[0538] Data store 304 and display system 306 may each be in communication with computing platform 302. In some examples, data store 304, display system 306, or both may be considered part of or otherwise integrated with computing platform 302. Thus, in some examples, computing platform 302, data store 304, and display system 306 may be separate components in communication with each other, but in other examples, some combination of these components may be integrated together. Communication between these different components may be implemented using any number of wired communications links, wireless communications links, optical communications links, or a combination thereof.

[0539] Analysis system 300 includes, for example, peptide structure analyzer 308, which may be implemented using hardware, software, firmware, or a combination thereof. In one or more embodiments, peptide structure analyzer 308 is implemented using computing platform 302.

[0540] Peptide structure analyzer 308 receives peptide structure data 310 for processing. Peptide structure data 310 may be, for example, the peptide structure data that is output from sample preparation and processing 106 in FIGS. 1, 2A, and 2B. Accordingly, peptide structure data 310 may correspond to set of peptide structures 122 identified for biological sample 112 and may thereby correspond to biological sample 112.

[0541] Peptide structure data 310 can be sent as input into peptide structure analyzer 308, retrieved from data store 304 or some other type of storage (e.g., cloud storage), accessed from cloud storage, or obtained in some other manner. In some cases, peptide structure data 310 may be retrieved from data store 304 in response to (e.g., directly or indirectly based on) receiving user input entered by a user via an input device.

[0542] Peptide structure analyzer 308 includes model 312 that is configured to receive peptide structure data 310 for processing. Model 312 may be implemented in any of a number of different ways. Model 312 may be implemented using any number of models, functions, equations, algorithms, and/or other mathematical techniques.

[0543] In one or more embodiments, model 312 includes machine learning system 314, which may itself be comprised of any number of machine learning models and/or algorithms. For example, machine learning system 314 may include, but is not limited to, at least one of a deep learning model, a neural network, a linear discriminant analysis model, a quadratic discriminant analysis model, a support vector machine, a random forest algorithm, a nearest neighbor algorithm (e.g., a k-Nearest Neighbors algorithm), a combined discriminant analysis model, a k-means clustering algorithm, an unsupervised model, a multivariable regression model, a penalized multivariable regression model, or another type of model. In various embodiments, model 312 includes a machine learning system 314 that comprises any number of or combination of the models or algorithms described above.

[0544] In various embodiments, model 312 analyzes peptide structure data 310 to generate disease indicator 316 that indicates whether the biological sample is positive for an ovarian cancer disease state based on set of peptide structures 318 identified as being associated with the ovarian cancer disease state. Peptide structure data 310 may include quantification data for the plurality of peptide structures. Quantification data for a peptide structures can include at least one of an abundance, a relative abundance, a normalized abundance, a relative quantity, an adjusted quantity, a normalized quantity, a relative concentration, an adjusted concentration, or a normalized concentration. For example, peptide structure data 310 may include a set of quantification metrics for each peptide structure of a plurality of peptide structures. A quantification metric for a peptide structure may be selected as one of a relative quantity, an adjusted quantity, a normalized quantity, a relative abundance, an adjusted abundance, and a normalized abundance. In some cases, a quantification metric for a peptide structure is selected from one of a relative concentration, an adjusted concentration, and a normalized concentration. In one or more embodiments, the quantification metrics used are normalized abundances. In this manner, peptide structure data 310 may provide abundance information about the plurality of peptide structures with respect to biological sample 112.

[0545] Disease indicator 316 may take various forms. In some examples, disease indicator 316 includes a classification that indicates whether or not the subject is positive for the ovarian cancer disease state. In various embodiments, disease indicator 316 can include a score 320. Score 320 indicates whether the ovarian cancer disease state is present or not. For example, score 320 may be, a probability score that indicates how likely it is that the biological sample 112 evidences the presence of the ovarian cancer disease state.

[0546] In one or more embodiments, a peptide structure of set of peptide structures 318 comprises a glycosylated peptide structure, or glycopeptide structure, that is defined by a peptide sequence and a glycan structure attached to a linking site of the peptide sequence quantity. For example, the peptide structure may be a glycopeptide or a portion of a glycopeptide. In some embodiments, a peptide structure of set of peptide structures 318 comprises an aglycosylated peptide structure that is defined by a peptide sequence. For example, the peptide structure may be a peptide or a portion of a peptide and may be referred to as a quantification peptide.

[0547] Set of peptide structures 318 may be identified as being those most predictive or relevant to the ovarian cancer disease state based on training of model 312. In one or more embodiments, set of peptide structures 318 includes at least one, at least two, or at least three peptide structures from a first group of peptide structures (peptide structures PS-165 through PS-174) identified in Table 41. or at least one, at least two, or at least three peptide structures from a second group of peptide structures (peptide structures PS-169 and PS-175 through PS-198) identified in Table 42. For example, in one or more embodiments, set of peptide structures 318 includes at least 1, at least 2, at least 3, at least 4, at least 5, at least 6, at least 7, at least 8, at least 9, or all 10 of the peptide structures identified in Table 41. In one or more other embodiments, set of peptide structures 318 includes at least 1, at least 2, at least 3, at least 4, at least 5, at least 6, at least 7, at least 8, at least 9, at least 10, at least 11, at least 12, at least 13, at least 14, at least 15, at least 16, at least 17, at least 18, at least 19, at least 20, at least 21, at least 22, at least 23, at least 23, at least 24, or all 25 of the peptide structures identified in Table 42. In one or more embodiments, set of peptide structures 318 includes at least peptide structure PS-169, which is identified in both Table 41 and Table 42. In some cases, the number of peptide structures selected from Table 41 for inclusion in set of peptide structures 318 may be based on, for example, a desired level of accuracy.

[0548] In one or more embodiments, set of peptide structures 318 includes at least 1, at least 2, at least 3, at least 4, at least 5, at least 6, at least 7, at least 8, at least 9, at least 10, at least 11, at least 12, at least 13, at least 14, at least 15, at least 16, at least 17, at least 18, at least 19, at least 20, at least 21, at least 22, at least 23, at least 23, at least 24, at least 25, at least 26, at least 27, at least 28, at least 29, at least 30, at least 31, at least 32, at least 33, at least 34, at least 35, at least 36, at least 37, or all 38 of the peptide structures identified in Table 43A. In one or more embodiments, set of peptide structures 318 includes at least 1, 2, 3, 4, 5, 6, 7, 8, 9, 10, 11, 12, 13, 14, 15, 16, 17, 18, 19, 20, 21, 22, 23, 24, 25, 26, 27, 28, 29, 30, 31, 32, 33, 34, 35, 36, 37, 38, 39, 40, 412, 42, 43, 44, 45, 46, 47, 48, 49, 50, 51, 52, 53, 54, 55, 56, 57, 58, 59, 60, or all 61 of the peptide structures listed in Tables 41, 42, 43A, 43B, 43C, and 43D.

[0549] In various embodiments, machine learning system 314 takes the form of binary classification model 322. Binary classification model 322 may include, for example, but is not limited to, a regression model. Binary classification model 322 may include, for example, a penalized multivariable regression model that is trained to identify set of peptide structures 318 from a plurality of (or panel of) peptide structures identified in various subjects. Binary classification model 322 may be trained to identify weight coefficients for peptide structures and those peptide structures having non-zero weights or weight coefficients above a selected threshold (e.g., absolute weight coefficient above 0.0, 0.01, 0.05, 0.1, 0.015, 0.2, etc.) may be selected for inclusion in set of peptide structures 318.

[0550] Peptide structure analyzer 308 may generate final output 128 based on disease indicator 316 output by model 312. In other embodiments, final output 128 may be an output generated by model 312.

[0551] In some embodiments, final output 128 includes disease indicator 316. In one or more embodiments, final output 128 includes diagnosis output 324, treatment output 326, or both. Diagnosis output 324 may include, for example, a diagnosis for the ovarian cancer disease state. The diagnosis can include a positive diagnosis or a negative diagnosis for the ovarian cancer disease state. In one or more embodiments, generating diagnosis output 324 may include comparing score 320 to selected threshold 328 to determine the diagnosis. Selected threshold 328 may be, for example, without limitation, a score between 0.30 and 0.65 (e.g., 0.4, 0.5, 0.6, etc.). For example, when selected threshold 328 is set to 0.5, a score 320 above 0.5 (or at or above 0.5) may indicate the presence of the ovarian cancer disease state and be output in diagnosis output 324 as a positive diagnosis. A score 320 below 0.5 (or at or below 0.5) may indicate that the ovarian cancer disease state is not present and be output in diagnosis output 324 as a negative diagnosis. In one or more embodiments, a negative diagnosis indicates that the subject is healthy. In one or more embodiments, a negative diagnosis indicates that a detected pelvic tumor (or mass) is benign.

[0552] In one or more embodiments, when disease indicator 316 and/or diagnosis output 324 indicate a positive diagnosis for the ovarian cancer disease state, a biopsy may be recommended. For example, a biopsy of the subject may be performed in response to disease indicator 316 and/or diagnosis output 324 indicating a positive diagnosis for the ovarian cancer disease state. In some embodiments, peptide structure analyzer 308 (or another system implemented on computing platform 302) may generate a report recommending that a biopsy is to be performed for the subject in response to disease indicator 316 and/or diagnosis output 324 indicating a positive diagnosis for the ovarian cancer disease state. In other embodiments, peptide structure analyzer 308 may send diagnosis final output 128 to remote system 130 over one or more wireless, wired, and/or optical communications links and remote system 130 may generate a report recommending that a biopsy is to be performed for the subject in response to disease indicator 316 and/or diagnosis output 324 indicating a positive diagnosis for the ovarian cancer disease state. The biopsy may be used to confirm the diagnosis to determine whether or not to administer treatment and/or how quickly to administer treatment. When disease indicator 316 and/or diagnosis output 324 indicate a negative diagnosis for the ovarian cancer disease state (e.g., benign pelvic tumor), the report that is generated by peptide structure analyzer 308, remote system 130, or some other system implemented on computing platform 142 may recommend a period of monitoring for the subject. For example, a negative diagnosis indication by disease indicator 316 and/or diagnosis output 324 may thus help prevent unnecessary treatment or overtreatment of the subject.

[0553] Treatment output 326 may include, for example, at least one of an identification of a treatment for the subject, a treatment plan for administering the treatment, or both. Treatment for ovarian cancer may include, for example, but is not limited to, at least one of surgery, radiation therapy, a targeted drug therapy (e.g., one or more targeted therapeutic agents), chemotherapy (e.g., one or more chemotherapeutic agents), immunotherapy (e.g., one or more immunotherapeutic agents), hormone therapy, neoadjuvant therapy, or some other form of treatment. The treatment plan may include, for example, but is not limited to, a timeline or schedule for administering the treatment, dosing information, other treatment-related information, or a combination thereof. Final output 128 may be sent to remote system 130 for processing in some examples. In other embodiments, final output 128 may be displayed on graphical user interface 330 in display system 306 for viewing by a human operator.

### V.D. Analysis System for Peptide Structure Data Analysis for Managing Melanoma Treatment

[0554] FIG. 3 is a block diagram of an analysis system 300 in accordance with one or more embodiments. Analysis system 300 can be used to both detect and analyze various peptide structures that have been associated with melanoma treatments. Analysis system 300 is one example of an implementation for a system that may be used to perform data analysis 108 in FIG. 1. Thus, analysis system 300 is described with continuing reference to workflow 100 as described in FIGS. 1, 2A, and/or 2B.

[0555] Analysis system 300 may include computing platform 302 and data store 304. In some embodiments, analysis system 300 also includes display system 306. Computing platform 302 may take various forms. In one or more embodiments, computing platform 302 includes a single computer (or computer system) or multiple computers in communication with each other. In other examples, computing platform 302 takes the form of a cloud computing platform. In still other examples, computing platform 302 may include any number of or combination computers, cloud computing platforms, servers, or mobile devices.

[0556] Data store 304 and display system 306 may each be in communication with computing platform 302. In some examples, data store 304, display system 306, or both may be considered part of or otherwise integrated with computing platform 302. Thus, in some examples, computing platform 302, data store 304, and display system 306 may be separate components in communication with each other, but in other examples, some combination of these components may be integrated together. Communication between these different components may be implemented using any number of wired communications links, wireless communications links, optical communications links, or a combination thereof.

[0557] Analysis system 300 includes, for example, treatment management system 308, which may be implemented using hardware, software, firmware, or a combination thereof. In one or more embodiments, peptide structure analyzer 308 is implemented using computing platform 302.

[0558] Treatment management system 308 may be used to manage the treatment of a subject diagnosed with a melanoma condition (i.e., malignant melanoma). Treatment management system 308 may be used to predict the subject's response to one or more treatments for the melanoma condition, select a treatment to be administered to the subject to prevent the progression (or advancement) of the melanoma condition and/or otherwise improve the condition of the subject, and/or otherwise plan the treatment of the subject.

[0559] Treatment management system 308 receives peptide structure data 310 for processing. Peptide structure data 310 may have been generated using multiple reaction monitoring mass spectrometry. Peptide structure data 310 may be, for example, the peptide structure data that is output from sample preparation and processing 106 in FIGS. 1, 2A, and 2B. Accordingly, peptide structure data 310 may correspond to set of peptide structures 122 identified for biological sample 112 and may thereby correspond to biological sample 112. Further, as set of peptide structures 122 corresponds to a set of glycoproteins (e.g., each peptide structure of set of peptide structures 122 being derived from a corresponding glycoprotein), peptide structure data 310 therefore corresponds to the set of glycoproteins. In some cases, two or more peptide structures may correspond to a same glycoprotein and these two or more peptide structures may be referred to as glycoforms of that same glycoprotein.

[0560] Peptide structure data 310 can be sent as input into treatment management system 308, retrieved from data store 304 or some other type of storage (e.g., cloud storage), accessed from cloud storage, or obtained in some other manner. In some cases, peptide structure data 310 may be retrieved from data store 304 in response to (e.g., directly or indirectly based on) receiving user input entered by a user via an input device.

[0561] Treatment management system 308 may include scoring system 312. In one or more embodiments, treatment management system 308 further includes and treatment planning system 314. Scoring system 312 may be used to predict the response of a subject (e.g., subject 114) to one or more types of treatment. Treatment planning system 314 may be used to plan how to treat the subject based on the predicted response(s) for the subject.

[0562] Scoring system 312 may include, for example, model system 315 that is configured to receive peptide structure data 310 for processing. Model system 315 may be implemented in any of a number of different ways. Model system 315 may be a computational model system that may be implemented using any number of models, functions, equations, algorithms, and/or other mathematical techniques.

[0563] In one or more embodiments, scoring system 312 receives peptide structure data 310 for processing and inputs quantification data 316 identified from peptide structure data 310 for set of peptide structures 318 into model system 315. Model system 315 analyzes quantification data 316 to generate set of treatment scores 320 corresponding to a set of treatments. Peptide structure data 310 may comprise a set of quantification metrics for each peptide structure of, for example, set of peptide structures 122 in FIG. 1. A quantification metric for a peptide structure may be comprised of at least one of a relative abundance, a normalized abundance, an adjusted abundance, an absolute abundance, a relative quantity, an adjusted quantity, a normalized quantity, a relative concentration, an adjusted concentration, or a normalized concentration. Accordingly, quantification data 316 may include one or more quantification metrics for each peptide structure of set of peptide structures 318.

[0564] A peptide structure of set of peptide structures 318 may be a glycosylated peptide structure, or glycopeptide structure, that is defined by a peptide sequence and a glycan structure attached to a linking site of the peptide sequence quantity. For example, the peptide structure may be a glycopeptide or a portion of a glycopeptide. Alternatively, a peptide structure of set of peptide structures 318 may be an aglycosylated peptide structure that is defined by a peptide sequence. For example, the peptide structure may be a peptide or a portion of a peptide and may be referred to as a quantification peptide.

[0565] Set of peptide structures 318 may be identified as being those most predictive or relevant to the response of a subject to a corresponding treatment(s) based on training of model 312. In one or more embodiments, set of peptide structures 318 includes at least one, at least three, at least five, or at least some other number of the peptide structures identified in Table 55 below in Section V.B. The number of peptide structures selected from Table 55 for inclusion in set of peptide structures 318 may be based on, for example, a desired level of accuracy, the number of treatments for which set of treatment scores 320 are being generated, one or more other factors, or a combination thereof.

[0566] In one or more embodiments, model system 315 may be used to analyze the response of a subject to a pembrolizumab treatment (“pembro”), the response of the subject to a combination treatment comprised of the combination of nivolumab and ipilimumab (“ipi/nivo”). Both pembro and ipi/nivo are treatments used to treat melanoma. For example, model system 315 may use quantification data 316 for set of peptide structures 318 to generate set of treatment scores 320 that includes a first treatment score 322 for pembro and a second treatment score 324 for ipi/nivo. In one or more embodiments, set of peptide structures 318 may include first subset 321 of set of peptide structures 318 used to compute first treatment score 322 and second subset 323 of set of peptide structures 318 used to compute second treatment score 324. In one or more embodiments, first subset 321 and the second subset 323 of set of peptide structures 318 may partially overlap (e.g., have one, two, three, four, five, some other number of peptide structures in common.

[0567] First portion 326 of quantification data 316 used to compute first treatment score 322 may correspond to first subset 321. Second portion 328 of quantification data 316 used to compute second treatment score 324 may correspond to second subset 323. First portion 326 and second portion 328 may be referred to as first quantification data and second quantification data, respectively. When first subset 321 and second subset 323 partially overlap, first portion 326 and second portion 328 similarly overlap. As one example, first portion 326 of quantification data 316 corresponding to first portion 321 used to compute first treatment score 322 and second portion 328 of quantification data 316 corresponding to second subset 323 of set of peptide structures 318 used to compute second treatment score 324 may have two peptide structures in common.

[0568] In one or more embodiments, first subset 321 of set of peptide structures 318 includes at least one, at least three, at least five, or at least some other number of the peptide structures identified in Table 56 below in Section V.B. In one or more embodiments, second subset 323 of set of peptide structures 318 includes at least one, at least three, at least five, or at least some other number of the peptide structures identified in Table 57 below in Section V.B.

[0569] In one or more embodiments, set of peptide structures 318 may have been identified by treatment management system 308 using relevance system 330. Relevance system 330 may include any number of computational models to analyze sample data 332 to determine which peptide structures to include in set of peptide structures 318. Sample data 332 may be retrieved from data store 304 or received in some other manner. Sample data 332 may include data capturing multiple subjects' responses to one or more treatments. For example, sample data 332 may include data capturing subjects' responses to pembro and to subjects' responses to ipi/nivo.

[0570] In one or more embodiments, relevance system 330 includes a first algorithm that uses a Wilcoxon rank-sum test to determine first subset 321 and a second algorithm that uses the Wilcoxon rank-sum test to determine second subset 323. For example, relevance system 330 includes a first algorithm that uses a Wilcoxon rank-sum test to determine which peptide structures to include in first subset 321 to compute first treatment score 322 (e.g., for pembro) and a second algorithm that uses the Wilcoxon rank-sum test to determine which peptide structures to include in second subset 323 to compute second treatment score 324 (e.g., for ipi/nivo).

[0571] Treatment planning system 314 receives set of treatment scores 320 from scoring system 312. Treatment planning system 314 uses set of treatment scores 320 to generate treatment output 334. Treatment output 334 may include, for example, an identification or categorization of the response of the subject to the one or more treatments for which the subject's response is being predicted, at least one of an identification of a therapeutic to treat the subject, a design for the therapeutic, a treatment plan for administering the therapeutic, or a combination thereof. In some embodiments, the therapeutic is an immune checkpoint inhibitor. In various embodiments, treatment output 326 includes a therapeutic dosage for each therapeutic to be used in treating the subject.

[0572] In one or more embodiments, treatment output 334 identifies a response classification that indicates a predicted response for the subject to a treatment. For example, set of treatment scores 320 may include a treatment score that can be used to classify a subject's response to a melanoma treatment as either early disruption or sustained control.

[0573] The response classification may be, for example, a positive response classification, a negative response classification, or some other type of response classification. A positive response classification may, for example, indicate that the subject is predicted to have a relatively positive or otherwise successful response to treatment. A negative response classification may, for example, indicate that the subject is predicted to have a relatively poor or otherwise unsuccessful response to treatment. In one or more embodiments, the response classification predicts response to treatment with respect to survivability (e.g., overall survival, progression-free survival, etc.).

[0574] “Early disruption” may be an example of a negative response classification. “Early disruption” may indicate that the subject is predicted to have a relatively poor response to the treatment. For example, a prediction of “early disruption” may mean that the subject is predicted to have a disruption event within an initial period of time (e.g., 6 months) after treatment. A disruption event may be any event that disrupts the subject's “progression-free survival” (PFS). A disruption event may be also referred to as a progression event or an advancement event as such an event indicates disease progression or advancement. In some cases, the progression event may be a final level of progression or disease advancement, such as death. Thus, “early disruption” may also be referred to as “progression,” “disease progression,” or “disease advancement.” A disruption event may include, for example, at least one of a new melanoma (e.g., malignant mole), an increase in the size of an existing melanoma, or some other type of event. A disruption event may be detected using any number of progression criteria. For example, a disruption event may be considered “detected” in response to a selected number or proportion of a set of progression criteria being met. The set of progression criteria may include, for example, but is not limited to, one or more immune-related response criteria (irRC), one or more response evaluation criteria in solid tumors (RECIST), one or more other types of criteria, or a combination thereof.

[0575] “Sustained control” may be one example of a positive response classification. “Sustained control” may be a response classification that indicates that the subject is predicted to have a relatively successful response to the treatment. For example, a prediction of “sustained control” may mean that the subject is predicted to have no disruption events within a sustained period of time (e.g., 12 months) after treatment. The sustained period of time may be longer than the initial period of time.

[0576] In one or more embodiments, treatment planning system 314 uses one or more selected thresholds to classify set of treatment scores 320. In one or more embodiments, a different selected threshold is used for each treatment. In other embodiments, a same threshold is used for all treatments being considered. For example, treatment planning system 314 may use selected threshold 336. In one or more embodiments, selected threshold is 0.5. In other embodiments, selected threshold is 0.6, 0.7, 0.75, 0.8, or some other threshold.

[0577] As one example, when selected threshold is 0.5, treatment planning system 314 may generate a first predicted response based on a determination that a treatment score is above (or is at and above) the selected threshold and may generate a second predicted response based on a determination that the treatment score is not above (or is below) the selected threshold. The first predicted response may be, for example, a first predicted response classification (e.g., sustained control); the second predicted response may be a second predicted response classification (e.g., early disruption).

[0578] Treatment output 334 may include the response classification that is predicted such that a user (e.g., a medical professional) can determine whether a corresponding treatment should be or should not be administered to a subject. For example, when first treatment score 322 is generated for pembro, and treatment output 334 indicates that a subject's predicted response is “early disruption,” a medical professional may determine to administer a different treatment, a higher dosage of pembro, or change the treatment plan for the subject in some other way.

[0579] When set of treatment scores 320 includes at least two treatment scores, treatment planning system 314 may analyze the at least two treatment scores and determine which treatment score indicates a best response to the corresponding treatment for the subject. As one example, treatment planning system 314 may compare the at least treatment scores and select the treatment corresponding to the highest treatment score for the subject. This selected treatment may then be identified in treatment output 334. In some cases, treatment output 334 may further include a therapeutic dosage (e.g., an approved dosage) for selected treatment for the subject. In some cases, treatment output 334 may further include a response classification for the selected treatment. For example, while first treatment score 322 may be higher than second treatment score 324, both first treatment score 322 and second treatment score 324 may indicate that the predicted response for the subject is “early disruption” with both treatments. In this example, treatment output 336 may identify the treatment corresponding to first treatment score 322 with an indication that the predicted response “early disruption” and a recommendation to either select a different treatment, alter (e.g., increase/decrease) a dosage of the treatment corresponding to first treatment score 322, combine the treatment with at least one other treatment, or change the treatment plan for the subject in some other manner.

[0580] Treatment output 334 may be sent to remote system 130 for processing in some examples. In other embodiments, treatment output 334 may be displayed on graphical user interface 338 in display system 306 for viewing by a human operator. The human operator may use treatment output 334 to manage the melanoma treatment of the subject.

### V.E. Computer Implemented System

[0581] FIG. 4 is a block diagram of a computer system in accordance with various embodiments. Computer system 400 may be an example of one implementation for computing platform 302 described above in FIG. 3.

[0582] In one or more examples, computer system 400 can include a bus 402 or other communication mechanism for communicating information, and a processor 404 coupled with bus 402 for processing information. In various embodiments, computer system 400 can also include a memory, which can be a random-access memory (RAM) 406 or other dynamic storage device, coupled to bus 402 for determining instructions to be executed by processor 404. Memory also can be used for storing temporary variables or other intermediate information during execution of instructions to be executed by processor 404. In various embodiments, computer system 400 can further include a read only memory (ROM) 408 or other static storage device coupled to bus 402 for storing static information and instructions for processor 404. A storage device 410, such as a magnetic disk or optical disk, can be provided and coupled to bus 402 for storing information and instructions.

[0583] In various embodiments, computer system 400 can be coupled via bus 402 to a display 412, such as a cathode ray tube (CRT) or liquid crystal display (LCD), for displaying information to a computer user. An input device 414, including alphanumeric and other keys, can be coupled to bus 402 for communicating information and command selections to processor 404. Another type of user input device is a cursor control 416, such as a mouse, a joystick, a trackball, a gesture input device, a gaze-based input device, or cursor direction keys for communicating direction information and command selections to processor 404 and for controlling cursor movement on display 412. This input device 414 typically has two degrees of freedom in two axes, a first axis (e.g., x) and a second axis (e.g., y), that allows the device to specify positions in a plane. However, it should be understood that input devices 414 allowing for three-dimensional (e.g., x, y, and z) cursor movement are also contemplated herein.

[0584] Consistent with certain implementations of the present teachings, results can be provided by computer system 400 in response to processor 404 executing one or more sequences of one or more instructions contained in RAM 406. Such instructions can be read into RAM 406 from another computer-readable medium or computer-readable storage medium, such as storage device 410. Execution of the sequences of instructions contained in RAM 406 can cause processor 404 to perform the processes described herein. Alternatively, hard-wired circuitry can be used in place of or in combination with software instructions to implement the present teachings. Thus, implementations of the present teachings are not limited to any specific combination of hardware circuitry and software.

[0585] The term “computer-readable medium” (e.g., data store, data storage, storage device, data storage device, etc.) or “computer-readable storage medium” as used herein refers to any media that participates in providing instructions to processor 404 for execution. Such a medium can take many forms, including but not limited to, non-volatile media, volatile media, and transmission media. Examples of non-volatile media can include, but are not limited to, optical, solid state, magnetic disks, such as storage device 410. Examples of volatile media can include, but are not limited to, dynamic memory, such as RAM 406. Examples of transmission media can include, but are not limited to, coaxial cables, copper wire, and fiber optics, including the wires that comprise bus 402.

[0586] Common forms of computer-readable media include, for example, a floppy disk, a flexible disk, hard disk, magnetic tape, or any other magnetic medium, a CD-ROM, any other optical medium, punch cards, paper tape, any other physical medium with patterns of holes, a RAM, PROM, and EPROM, a FLASH-EPROM, any other memory chip or cartridge, or any other tangible medium from which a computer can read.

[0587] In addition to computer readable medium, instructions or data can be provided as signals on transmission media included in a communications apparatus or system to provide sequences of one or more instructions to processor 404 of computer system 400 for execution. For example, a communication apparatus may include a transceiver having signals indicative of instructions and data. The instructions and data are configured to cause one or more processors to implement the functions outlined in the disclosure herein. Representative examples of data communications transmission connections can include, but are not limited to, telephone modem connections, wide area networks (WAN), local area networks (LAN), infrared data connections, NFC connections, optical communications connections, etc.

[0588] It should be appreciated that the methodologies described herein, flow charts, diagrams, and accompanying disclosure can be implemented using computer system 400 as a standalone device or on a distributed network of shared computer processing resources such as a cloud computing network.

[0589] The methodologies described herein may be implemented by various means depending upon the application. For example, these methodologies may be implemented in hardware, firmware, software, or any combination thereof. For a hardware implementation, the processing unit may be implemented within one or more application specific integrated circuits (ASICs), digital signal processors (DSPs), digital signal processing devices (DSPDs), programmable logic devices (PLDs), field programmable gate arrays (FPGAs), processors, controllers, micro-controllers, microprocessors, electronic devices, other electronic units designed to perform the functions described herein, or a combination thereof.

[0590] In various embodiments, the methods of the present teachings may be implemented as firmware and/or a software program and applications written in conventional programming languages such as C, C++, Python, etc. If implemented as firmware and/or software, the embodiments described herein can be implemented on a non-transitory computer-readable medium in which a program is stored for causing a computer to perform the methods described above. It should be understood that the various engines described herein can be provided on a computer system, such as computer system 400, whereby processor 404 would execute the analyses and determinations provided by these engines, subject to instructions provided by any one of or combination of, the memory components RAM 406, ROM, 408, or storage device 410 and user input provided via input device 414.

### V.F. Computer Implemented System for Diagnosis of NSCLC

[0591] FIG. 4 illustrates a block diagram of a computer system that may be utilized for performing one or more methods of classifying a biological sample obtained from a subject with respect to a plurality of states associated with NSCLC, detecting the presence of one of a plurality of states associated with NSCLC, treating NSCLC in a subject, treating NSCLC in a subject, diagnosing an individual with NSCLC, and training a model to diagnose a subject with one of a plurality of states associated with NSCLC, in accordance with the presently disclosed embodiments. Computer system 400 may be an example of one implementation for computing platform 302 described above in FIG. 3. In certain embodiments, computer system 400 can include a bus 402 or other communication mechanism for communicating information, and a processor 404 coupled with bus 402 for processing information. In certain embodiments, computer system 400 can also include a memory, which can be a random-access memory (RAM) 406 or other dynamic storage device, coupled to bus 402 for determining instructions to be executed by processor 404. Memory also can be used for storing temporary variables or other intermediate information during execution of instructions to be executed by processor 404. In various embodiments, computer system 400 can further include a read only memory (ROM) 408 or other static storage device coupled to bus 402 for storing static information and instructions for processor 404. A storage device 410, such as a magnetic disk or optical disk, can be provided and coupled to bus 402 for storing information and instructions.

[0592] In certain embodiments, computer system 400 can be coupled via bus 402 to a display 412, such as a cathode ray tube (CRT) or liquid crystal display (LCD), for displaying information to a computer user. An input device 414, including alphanumeric and other keys, can be coupled to bus 402 for communicating information and command selections to processor 404. Another type of user input device is a cursor control 416, such as a mouse, a joystick, a trackball, a gesture input device, a gaze-based input device, or cursor direction keys for communicating direction information and command selections to processor 404 and for controlling cursor movement on display 412. This input device 414 typically has two degrees of freedom in two axes, a first axis (e.g., x) and a second axis (e.g., y), that allows the device to specify positions in a plane. However, it should be understood that input devices 414 allowing for three-dimensional (e.g., x, y, and z) cursor movement are also contemplated herein.

### V.G. Computer Implemented System for Diagnosis of Ovarian Cancer

[0593] FIG. 4 is a block diagram of a computer system in accordance with various embodiments. Computer system 400 may be an example of one implementation for computing platform 302 described above in FIG. 3.

[0594] In one or more examples, computer system 400 can include a bus 402 or other communication mechanism for communicating information, and a processor 404 coupled with bus 402 for processing information. In various embodiments, computer system 400 can also include a memory, which can be a random-access memory (RAM) 406 or other dynamic storage device, coupled to bus 402 for determining instructions to be executed by processor 404. Memory also can be used for storing temporary variables or other intermediate information during execution of instructions to be executed by processor 404. In various embodiments, computer system 400 can further include a read only memory (ROM) 408 or other static storage device coupled to bus 402 for storing static information and instructions for processor 404. A storage device 410, such as a magnetic disk or optical disk, can be provided and coupled to bus 402 for storing information and instructions.

[0595] In various embodiments, computer system 400 can be coupled via bus 402 to a display 412, such as a cathode ray tube (CRT), liquid crystal display (LCD), or light emitting diode (LED) for displaying information to a computer user. An input device 414, including alphanumeric and other keys, can be coupled to bus 402 for communicating information and command selections to processor 404. Another type of user input device is a cursor control 416, such as a mouse, a joystick, a trackball, a gesture input device, a gaze-based input device, or cursor direction keys for communicating direction information and command selections to processor 404 and for controlling cursor movement on display 412. This input device 414 typically has two degrees of freedom in two axes, a first axis (e.g., x) and a second axis (e.g., y), that allows the device to specify positions in a plane. However, it should be understood that input devices 414 allowing for three-dimensional (e.g., x, y, and z) cursor movement are also contemplated herein.

[0596] Consistent with certain implementations of the present teachings, results can be provided by computer system 400 in response to processor 404 executing one or more sequences of one or more instructions contained in RAM 406. Such instructions can be read into RAM 406 from another computer-readable medium or computer-readable storage medium, such as storage device 410. Execution of the sequences of instructions contained in RAM 406 can cause processor 404 to perform the processes described herein. Alternatively, hard-wired circuitry can be used in place of or in combination with software instructions to implement the present teachings. Thus, implementations of the present teachings are not limited to any specific combination of hardware circuitry and software.

[0597] The term “computer-readable medium” (e.g., data store, data storage, storage device, data storage device, etc.) or “computer-readable storage medium” as used herein refers to any media that participates in providing instructions to processor 404 for execution. Such a medium can take many forms, including but not limited to, non-volatile media, volatile media, and transmission media. Examples of non-volatile media can include, but are not limited to, optical, solid state, magnetic disks, such as storage device 410. Examples of volatile media can include, but are not limited to, dynamic memory, such as RAM 406. Examples of transmission media can include, but are not limited to, coaxial cables, copper wire, and fiber optics, including the wires that comprise bus 402.

[0598] Common forms of computer-readable media include, for example, a floppy disk, a flexible disk, hard disk, magnetic tape, or any other magnetic medium, a CD-ROM, any other optical medium, punch cards, paper tape, any other physical medium with patterns of holes, a RAM, PROM, and EPROM, a FLASH-EPROM, any other memory chip or cartridge, or any other tangible medium from which a computer can read.

[0599] In addition to computer readable medium, instructions or data can be provided as signals on transmission media included in a communications apparatus or system to provide sequences of one or more instructions to processor 404 of computer system 400 for execution. For example, a communication apparatus may include a transceiver having signals indicative of instructions and data. The instructions and data are configured to cause one or more processors to implement the functions outlined in the disclosure herein. Representative examples of data communications transmission connections can include, but are not limited to, telephone modem connections, wide area networks (WAN), local area networks (LAN), infrared data connections, NFC connections, optical communications connections, etc.

[0600] It should be appreciated that the methodologies described herein, flow charts, diagrams, and accompanying disclosure can be implemented using computer system 400 as a standalone device or on a distributed network of shared computer processing resources such as a cloud computing network.

[0601] The methodologies described herein may be implemented by various means depending upon the application. For example, these methodologies may be implemented in hardware, firmware, software, or any combination thereof. For a hardware implementation, the processing unit may be implemented within one or more application specific integrated circuits (ASICs), digital signal processors (DSPs), digital signal processing devices (DSPDs), programmable logic devices (PLDs), field programmable gate arrays (FPGAs), processors, controllers, micro-controllers, microprocessors, electronic devices, other electronic units designed to perform the functions described herein, or a combination thereof.

[0602] In various embodiments, the methods of the present teachings may be implemented as firmware and/or a software program and applications written in conventional programming languages such as C, C++, Python, etc. If implemented as firmware and/or software, the embodiments described herein can be implemented on a non-transitory computer-readable medium in which a program is stored for causing a computer to perform the methods described above. It should be understood that the various engines described herein can be provided on a computer system, such as computer system 400, whereby processor 404 would execute the analyses and determinations provided by these engines, subject to instructions provided by any one of, or a combination of, the memory components RAM 406, ROM, 408, or storage device 410 and user input provided via input device 414.

### V.H. Computer Implemented System for Managing Melanoma

[0603] FIG. 4 is a block diagram of a computer system in accordance with various embodiments. Computer system 400 may be an example of one implementation for computing platform 302 described above in FIG. 3.

[0604] In one or more examples, computer system 400 can include a bus 402 or other communication mechanism for communicating information, and a processor 404 coupled with bus 402 for processing information. In various embodiments, computer system 400 can also include a memory, which can be a random-access memory (RAM) 406 or other dynamic storage device, coupled to bus 402 for determining instructions to be executed by processor 404. Memory also can be used for storing temporary variables or other intermediate information during execution of instructions to be executed by processor 404. In various embodiments, computer system 400 can further include a read only memory (ROM) 408 or other static storage device coupled to bus 402 for storing static information and instructions for processor 404. A storage device 410, such as a magnetic disk or optical disk, can be provided and coupled to bus 402 for storing information and instructions.

[0605] In various embodiments, computer system 400 can be coupled via bus 402 to a display 412, such as a cathode ray tube (CRT) or liquid crystal display (LCD), for displaying information to a computer user. An input device 414, including alphanumeric and other keys, can be coupled to bus 402 for communicating information and command selections to processor 404. Another type of user input device is a cursor control 416, such as a mouse, a joystick, a trackball, a gesture input device, a gaze-based input device, or cursor direction keys for communicating direction information and command selections to processor 404 and for controlling cursor movement on display 412. This input device 414 typically has two degrees of freedom in two axes, a first axis (e.g., x) and a second axis (e.g., y), that allows the device to specify positions in a plane. However, it should be understood that input devices 414 allowing for three-dimensional (e.g., x, y, and z) cursor movement are also contemplated herein.

[0606] Consistent with certain implementations of the present teachings, results can be provided by computer system 400 in response to processor 404 executing one or more sequences of one or more instructions contained in RAM 406. Such instructions can be read into RAM 406 from another computer-readable medium or computer-readable storage medium, such as storage device 410. Execution of the sequences of instructions contained in RAM 406 can cause processor 404 to perform the processes described herein. Alternatively, hard-wired circuitry can be used in place of or in combination with software instructions to implement the present teachings. Thus, implementations of the present teachings are not limited to any specific combination of hardware circuitry and software.

[0607] The term “computer-readable medium” (e.g., data store, data storage, storage device, data storage device, etc.) or “computer-readable storage medium” as used herein refers to any media that participates in providing instructions to processor 404 for execution. Such a medium can take many forms, including but not limited to, non-volatile media, volatile media, and transmission media. Examples of non-volatile media can include, but are not limited to, optical, solid state, magnetic disks, such as storage device 410. Examples of volatile media can include, but are not limited to, dynamic memory, such as RAM 406. Examples of transmission media can include, but are not limited to, coaxial cables, copper wire, and fiber optics, including the wires that comprise bus 402.

[0608] Common forms of computer-readable media include, for example, a floppy disk, a flexible disk, hard disk, magnetic tape, or any other magnetic medium, a CD-ROM, any other optical medium, punch cards, paper tape, any other physical medium with patterns of holes, a RAM, PROM, and EPROM, a FLASH-EPROM, any other memory chip or cartridge, or any other tangible medium from which a computer can read.

[0609] In addition to computer readable medium, instructions or data can be provided as signals on transmission media included in a communications apparatus or system to provide sequences of one or more instructions to processor 404 of computer system 400 for execution. For example, a communication apparatus may include a transceiver having signals indicative of instructions and data. The instructions and data are configured to cause one or more processors to implement the functions outlined in the disclosure herein. Representative examples of data communications transmission connections can include, but are not limited to, telephone modem connections, wide area networks (WAN), local area networks (LAN), infrared data connections, NFC connections, optical communications connections, etc.

[0610] It should be appreciated that the methodologies described herein, flow charts, diagrams, and accompanying disclosure can be implemented using computer system 400 as a standalone device or on a distributed network of shared computer processing resources such as a cloud computing network.

[0611] The methodologies described herein may be implemented by various means depending upon the application. For example, these methodologies may be implemented in hardware, firmware, software, or any combination thereof. For a hardware implementation, the processing unit may be implemented within one or more application specific integrated circuits (ASICs), digital signal processors (DSPs), digital signal processing devices (DSPDs), programmable logic devices (PLDs), field programmable gate arrays (FPGAs), processors, controllers, micro-controllers, microprocessors, electronic devices, other electronic units designed to perform the functions described herein, or a combination thereof.

[0612] In various embodiments, the methods of the present teachings may be implemented as firmware and/or a software program and applications written in conventional programming languages such as R, C, C++, Python, etc. If implemented as firmware and/or software, the embodiments described herein can be implemented on a non-transitory computer-readable medium in which a program is stored for causing a computer to perform the methods described above. It should be understood that the various engines described herein can be provided on a computer system, such as computer system 400, whereby processor 404 would execute the analyses and determinations provided by these engines, subject to instructions provided by any one of, or a combination of, the memory components RAM 406, ROM, 408, or storage device 410 and user input provided via input device 414.

### VI. Exemplary Methodologies Relating to Diagnosis based on Peptide Structure Data Analysis

### VIA. General Methodology

[0613] FIG. 5 is a flowchart of a process for classifying a biological sample obtained from a subject with respect to a plurality of states associated with fatty liver (FLD) progression. Process 500 may be implemented using, for example, at least a portion of workflow 100 as described in FIGS. 1, 2A, and 2B and/or analysis system 300 as described in FIG. 3. Process 500 may be used to generate a diagnosis output such as, for example, diagnosis output 324 in FIG. 3.

[0614] Step 502 includes receiving peptide structure data corresponding to a set of non-glycosylated peptides and/or glycopeptides in the biological sample obtained from a subject. The peptide structure data may be, for example, one example of an implementation of peptide structure data 310 in FIG. 3. The peptide structure data may include quantification data for each peptide structure of a plurality of peptide structures. In certain embodiments, the set of peptide structures includes at least one peptide structure identified from a plurality of peptide structures in Table 1A or 1B. The peptide structure data may have been generated using, for example, without limitation, multiple reaction monitoring mass spectrometry (MRM-MS). In various embodiments, the peptide structure data includes quantification data for the plurality of peptide structures. This quantification data for a peptide structure may include, for example, without limitation, at least one of an abundance, a relative abundance, a normalized abundance, a relative quantity, an adjusted quantity, a normalized quantity, a relative concentration, an adjusted concentration, or a normalized concentration for the peptide structure. In various embodiments, the quantification data comprises normalized abundances for the peptide structures.

[0615] In various embodiments, the peptide structure data is generated for a sample created from the biological sample, and in various embodiments the sample is a serum sample. For example, the biological sample may be prepared using reduction, alkylation, and enzymatic digestion to form a prepared sample. The prepared sample includes the plurality of peptide structures for which the peptide structure data is generated and then received in step 502.

[0616] Step 504 includes inputting quantification data identified from the peptide structure data for a set of peptide structures into a machine learning model. In some embodiments, the set of peptide structures includes at least one peptide structure identified from a plurality of peptide structures in Table 1A or 1B. In various embodiments, at least one peptide structure comprises a non-glycosylated peptide and/or a glycopeptide structure defined by a peptide sequence and a glycan structure linked to the peptide sequence at a linking site of the peptide sequence, as identified in Table 1A or 1B.

[0617] The quantification data may include, for example, one or more quantification metrics for each peptide structure of the plurality of peptide structures. A quantification metric for a peptide structure may be, for example, but is not limited to, a relative quantity, an adjusted quantity, a normalized quantity, a relative concentration, an adjusted concentration, or a normalized concentration. In this manner, the quantification data for a given peptide structure provides an indication of the abundance of the peptide structure in the biological sample. In various embodiments, the quantification data comprises normalized abundances for the peptide structures. The machine learning model may be, for example, a supervised machine learning model.

[0618] Step 506 includes analyzing the quantification data using the machine learning model to generate a disease indicator. In various embodiments, the disease indicator that is generated may include an indication of whether the biological sample evidences a state associated with FLD progression. For example, the disease indicator may indicate whether the biological sample is likely positive for NASH or not or may indicate a stage of NASH, such as early stage vs. late stage. In various embodiments, the disease indicator comprises a probability that the biological sample evidences a NASH state or a probability that the biological sample evidences an early NASH stage vs. late NASH stage. In various embodiments, the machine learning model may generate an output that classifies the biological sample as positive for the NASH state, positive for a healthy (or non-NASH) state, or that classifies the biological sample as being a stage of early NASH stage vs. late NASH stage. In various embodiments, the disease indicator can be a score.

[0619] Step 508 includes generating a diagnosis output based on the disease indicator that classifies the biological sample as evidencing a corresponding state of a plurality of states associated with the FLD progression. In various embodiments, the plurality of states can include a NASH state and a non-NASH state, or the plurality of states can include a stage of NASH, such as early stage or late stage. In some embodiments, the plurality of states can include a non-NASH state that comprises at least one of a healthy state, a liver disease-free state, or some other type of non-NASH state.

[0620] When the disease indicator is a score, step 508 may include determining that the score falls within a selected range associated with the corresponding state of the plurality of states. In various embodiments, for Model 1, a predicted probability >0.5 may indicate a likelihood of control or healthy, and a predicted probability <0.5 may indicate a likelihood of the presence of NASH, whereas for Model 2, a predicted probability >0.5 may indicate a likelihood of the presence of early stage NASH and <0.5 may indicate a likelihood of the presence of late stage NASH. In some embodiments, step 506 may include determining that the biological sample evidences the corresponding state based on a determination that the score falls within the selected range associated with corresponding state.

[0621] In various embodiments, generating the diagnosis output in step 508 includes generating the diagnosis output as part of a report that identifies the corresponding state. In some embodiments, step 508 may also include generating a treatment output based on at least one of the diagnosis output or the disease indicator. In some embodiments, the treatment output comprises at least one of an identification of a treatment to treat the subject, a design for the treatment, a manufacturing plan for the treatment, or a treatment plan for administering the treatment.

[0622] For a subject that has been diagnosed with NASH, the treatment may include, for example, a therapeutically effective dosage of at least one of Obeticholic acid (OCA), Tropifexor, Elafibranor, Saroglitazar, Aramchol, Semaglutide, Tirzepatide, Cotadutide, NGM282, MSDC-0602K, Resmetirom, Cenicriviroc, Selonsertib, Emricasan, Simtuzumab, and GR-MD-02. Additionally or alternatively, the subject may be recommended to lose weight, exercise more, control glucose level, reduce cholesterol, limit salt intake, limit sugar intake, reduce cholesterol, avoid or reduce alcohol intake, avoid liver-harming medications or dietary supplements, get vaccinated for hepatitis A, get vaccinated for hepatitis B, take vitamin E, take pioglitazone, take liraglutide, monitor for hepatic cell carcinoma (HCC), or a combination thereof.

[0623] FIG. 6 is a flowchart of a process for detecting a presence of one of a plurality of states associated with fatty liver disease (FLD) progression in a biological sample. Process 600 may be implemented using, for example, at least a portion of workflow 100 as described in FIGS. 1, 2A, and 2B and/or analysis system 300 as described in FIG. 3.

[0624] Step 602 includes receiving peptide structure data corresponding to a set of non-glycosylated peptides and/or glycoproteins in the biological sample obtained from a subject. The peptide structure data may have been generated from a prepared sample using, for example, multiple reaction monitoring mass spectrometry (MRM-MS). The peptide structure data may include quantification data for each peptide structure of a panel of peptide structures. The quantification data for a peptide structure of the plurality of peptide structures may include at least one of a relative quantity, an adjusted quantity, a normalized quantity, a relative concentration, an adjusted concentration, a normalized concentration, or another quantification metric.

[0625] Step 604 includes analyzing the peptide structure data using a supervised machine learning model to generate a disease indicator based on at least 2 peptide structures selected from a group of peptide structures identified in Table 1A or 1B. In various embodiments, the supervised machine learning model comprises a logistic regression model.

[0626] In various embodiments, the at least 2 peptide structures include a non-glycosylated peptide and/or glycopeptide structure defined by a peptide sequence and a glycan structure linked to the peptide sequence at a linking site of the peptide sequence, as identified in Table 1A or 1B, with the peptide sequence being one of SEQ ID NOS: 1-23 as defined in Table 1A and SEQ ID NOS: 1-11 as defined in Table 1B, respectively.

[0627] In various embodiments, the at least 2 peptide structures include only peptide structures fragmented from alpha-1-antitrypsin (A1AT). In various embodiments, the at least 2 peptide structures include only peptide structures fragmented from alpha-2-macroglobulin (A2MG). In various embodiments, the at least 2 peptide structures include only peptide structures fragmented from Alpha-1-antichymotrypsin (AACT). In various embodiments, the at least 2 peptide structures include only peptide structures fragmented from Alpha-1-acid glycoprotein 1 and/or Alpha-1-acid glycoprotein 2 (AGP12). In various embodiments, the at least 2 peptide structures include only peptide structures fragmented from Apolipoprotein B-100 (APOB). In various embodiments, the at least 2 peptide structures include only peptide structures fragmented from Apolipoprotein C-III (APOC3). In various embodiments, the at least 2 peptide structures include only peptide structures fragmented from Histidine-rich Glycoprotein (HRG). In various embodiments, the at least 2 peptide structures include only peptide structures fragmented from Immunoglobulin heavy constant alpha 1 and/or 2 (IGA12). In various embodiments, the at least 2 peptide structures include only peptide structures fragmented from Immunoglobulin heavy constant gamma 1 (IGG1). In various embodiments, the at least 2 peptide structures include only peptide structures fragmented from Immunoglobulin heavy constant gamma 2 (IGG2). In various embodiments, the at least 2 peptide structures include only peptide structures fragmented from Plasma Kallikrein (KLKB1). In various embodiments, the at least 2 peptide structures include only peptide structures fragmented from Antithrombin-III.

[0628] In various embodiments, step 604 may include computing a peptide structure profile for the biological sample that identifies a weighted value for each peptide structure of the at least 2 peptide structures. In some embodiments, the weighted value for a peptide structure of the at least 2 peptide structures can be a product of a quantification metric for the peptide structure identified from the peptide structure data and a weight coefficient for the peptide structure. The weight coefficient of a corresponding peptide structure of the at least 2 peptide structures may indicate the relative significance of the corresponding peptide structure to the disease indicator. In various embodiments, analyzing the peptide structure data comprises computing the disease indicator using the peptide structure profile. The disease indicator may be, for example, a score that that indicates which state of a plurality of states is evidenced by the biological sample.

[0629] In various embodiments, the supervised machine learning (ML) model can employ, for example, one model or multiple different models for generating the final disease indicator. For example, the ML model can employ three different models, where each may each be, for example, a regression model that is used to analyze the peptide structure quantification data for a particular state versus the other states. For example, each of these three regression models may be used to distinguish between a given state of the plurality of states and the other states of the plurality of states.

[0630] Step 606 includes detecting the presence of a corresponding state of the plurality of states associated with the FLD progression in response to a determination that the disease indicator falls within a selected range associated with the corresponding state. In some embodiments, the plurality of states includes at least two selected from a group consisting of a non-alcoholic steatohepatitis (NASH) state, a non-NASH state (e.g., a control state, a healthy state, a liver disease-free state, etc.), and a stage of NASH, including early stage vs. late stage.

[0631] In various embodiments, the corresponding state is a non-NASH state and the selected range for the disease indicator associated with the non-NASH state may have a predicted probability >0.5. In some embodiments, the corresponding state is a NASH state and the selected range for the disease indicator associated with the NASH state may have a predicted probability <0.5. In some embodiments, the corresponding state is an early NASH stage and the selected range for the disease indicator associated with the early NASH stage may have a predicted probability >0.5. In some embodiments, the corresponding state is a late NASH stage and the selected range for the disease indicator associated with the late NASH stage may have a predicted probability <0.5.

[0632] In various embodiments, process 600 may further include generating a report that includes a diagnosis based on the corresponding state detected for the subject. The report may include, for example, the disease indicator.

[0633] FIG. 17 is a flowchart of a process for diagnosing a subject with respect to a pancreatic cancer (PC) disease state in accordance with one or more embodiments. Process 500 may be implemented using, for example, at least a portion of workflow 100 as described in FIGS. 1, 2A, and 2B and/or analysis system 300 as described in FIG. 3. Process 1700 may be used to generate a final output that includes at least a diagnosis output for the subject.

[0634] Step 1702 includes receiving peptide structure data corresponding to a biological sample obtained from the subject. The peptide structure data may be, for example, one example of an implementation of peptide structure data 310 in FIG. 3. The peptide structure data may include quantification data for each peptide structure of a plurality of peptide structures. The quantification data may include, for example, one or more quantification metrics for each peptide structure of the plurality of peptide structures. A quantification metric for a peptide structure may be, for example, but is not limited to, a relative quantity, an adjusted quantity, a normalized quantity, a relative concentration, an adjusted concentration, or a normalized concentration. In this manner, the quantification data for a given peptide structure provides an indication of the abundance of the peptide structure in the biological sample. In some cases, at least one peptide structure includes a glycopeptide structure having a peptide sequence and a glycan structure linked to the peptide sequence at a linking site of the peptide sequence, as identified in Table 16, with the peptide sequence being one of SEQ ID NOS: 77-119 as defined in Table 16.

[0635] Step 1704 includes analyzing the peptide structure data using a supervised machine learning model to generate a disease indicator that indicates whether the biological sample evidences a PC disease state based on at least 1 peptide structure selected from a group of peptide structures identified in Table 16, Table 17A, Table 17B, or Table 17C (below). In step 1704, the group of peptide structures in Table 16, Table 17A, Table 17B, or Table 17C is associated with the PC disease state. The group of peptide structures is listed in Table 16, Table 17A, Table 17B, or Table 17C with respect to relative significance to the disease indicator.

[0636] In one or more embodiments, the at least 1 peptide structure includes at least 1, at least 2, at least 3, at least 4, at least 5, at least 6, at least 7, at least 8, at least 9, at least 10, at least 11, at least 12, at least 13, at least 14, at least 15, at least 16, at least 17, at least 18, at least 19, at least 20, at least 21, at least 22, at least 23, at least 23, at least 24, at least 25, at least 26, at least 27, at least 28, at least 29, at least 30, at least 31, at least 32, at least 33, at least 34, at least 35, at least 36, at least 37, at least 38, at least 39, at least 40, at least 41, at least 42, at least 43, at least 44, at least 45, at least 46, at least 47, at least 48, at least 49, at least 50, at least 51, at least 52, at least 53, at least 54, or all 55 of the peptide structures PS-48 through PS-102 in Table 16.

[0637] In one or more embodiments, the at least 1 peptide structure includes at least 1, at least 2, at least 3, at least 4, at least 5, at least 6, at least 7, at least 8, at least 9, at least 10, at least 11, at least 12, at least 13, at least 14, at least 15, at least 16, at least 17, at least 18, at least 19, at least 20, at least 21, or all 22 of the peptide structures PS-49, PS-50, PS-54, PS-61, PS-63, PS-64, PS-71, PS-79, PS-81, PS-84, PS-86, PS-87, PS-90, PS-91, PS-92, PS-94, PS-95, PS-96, PS-97, PS-98, PS-99, or PS-101 in Table 17A.

[0638] In one or more embodiments, the at least 1 peptide structure includes at least 1, at least 2, at least 3, at least 4, at least 5, at least 6, at least 7, at least 8, at least 9, at least 10, at least 11, at least 12, at least 13, at least 14, at least 15, at least 16, at least 17, at least 18, or all 19 of the peptide structures PS-48, PS-52, PS-57, PS-61, PS-62, PS-63, PS-64, PS-69, PS-71, PS-72, PS-73, PS-84, PS-86, PS-88, PS-91, PS-94, PS-96, PS-100, or PS-101 in Table 17B.

[0639] In one or more embodiments, the at least 1 peptide structure includes at least 1, at least 2, at least 3, at least 4, at least 5, at least 6, at least 7, at least 8, at least 9, at least 10, at least 11, at least 12, at least 13, at least 14, at least 15, at least 16, or all 17 of the peptide structures PS-48, PS-52, PS-61, PS-64, PS-66, PS-68, PS-69, PS-71, PS-72, PS-73, PS-86, PS-89, PS-91, PS-94, PS-96, PS-99, or PS-101 in Table 17C.

TABLE 16
Peptide Structures associated with Pancreatic Cancer

| | | | | Linking Site | Linking Site | | |
|---|---|---|---|---|---|---|---|
| | Peptide | Prot | Pept | Position | Position | Glycan | |
| PS- | Structure (PS)- | SEQ ID | SEQ ID | within Prot | within | Struct | Monoisotopic |
| ID NO. | NAME | NO. | NO. | Seq | Pept Seq | GL NO. | mass |
| 48 | A1AT_107_5412 | 120 | 77 | 107 | 14 | 5412 | 6041.6468 |
| 49 | A1AT_107_6512 | 120 | 77 | 107 | 14 | 6512 | 6406.779 |
| 50 | A1AT_107_NONGLYCOSYLATED | 120 | 77 | N/A | N/A | N/A | 3690.8165 |
| 51 | A1AT_70_5402 | 120 | 78 | 70 | 7 | 5402 | 5385.4001 |
| 52 | A1BG_179_5402 | 121 | 79 | 179 | 27 | 5402 | 6040.442 |
| 53 | A2MG_1424_NONGLYCOSYLATED | 122 | 80 | N/A | N/A | N/A | 2162.1735 |
| 54 | A2MG_247_5200 | 122 | 81 | 247 | 10 | 5200 | 4950.3109 |
| 55 | A2MG_247_5401 | 122 | 81 | 247 | 10 | 5401 | 5647.5651 |
| 56 | A2MG_247MC_5401 | 122 | 82 | 247 | 10 | 5401 | 4344.8784 |
| 57 | A2MG_55_5412 | 122 | 83 | 55 | 9 | 5412 | 4747.056 |
| 58 | A2MG_869_5401 | 122 | 84 | 869 | 6 | 5401 | 5326.2974 |
| 59 | A2MG_869_5402 | 122 | 84 | 869 | 6 | 5402 | 5617.3928 |
| 60 | A2MG_869_6301 | 122 | 84 | 869 | 6 | 6301 | 5285.2709 |
| 61 | AACT_271_6512 | 123 | 85 | 271 | 4 | 6512 | 4467.8355 |
| 62 | AGP1_93_7614 | 124 | 86 | 93 | 7 | 7614 | 5578.1749 |
| 63 | AGP12_56_5412 | 125 & 126 | 87 | 56 | 5 | 5412 | 3146.1702 |
| 64 | AGP12_72_7601 | 125 & 126 | 88 | 72 | 15 | 7601 | 4562.8878 |
| 65 | AGP12_72MC_6503 | 125 & 126 | 89 | 72 | 15 | 6503 | 5755.449 |
| 66 | APOB_3895_5401 | 127 | 90 | 3895 | 9 | 5401 | 3826.5976 |
| 67 | APOB_983_5402 | 127 | 91 | 983 | 16 | 5402 | 5754.3354 |
| 68 | APOH_253_5412 | 128 | 92 | 253 | 3 | 5412 | 3600.3886 |
| 69 | APOM_135_5401 | 129 | 93 | 135 | 15 | 5401 | 4444.819 |
| 70 | APOM_135_5402 | 129 | 93 | 135 | 15 | 5402 | 4735.9144 |
| 71 | C1S_174_5402 | 130 | 94 | 174 | 5 | 5402 | 5730.4016 |
| 72 | CERU_397_5412 | 131 | 95 | 397 | 2 | 5412 | 4476.8219 |
| 73 | CO5_741_5401 | 132 | 96 | 74 | 2 | 5401 | 2582.0375 |
| 74 | CO5_741_5402 | 132 | 96 | 741 | 2 | 5402 | 2873.1329 |
| 75 | FETUA_156_5412 | 133 | 97 | 156 | 12 | 5412 | 4121.6695 |
| 76 | HEMO_187_5412 | 134 | 98 | 187 | 7 | 5412 | 3754.4918 |
| 77 | HEMO_453_5401 | 134 | 99 | 453 | 7 | 5401 | 3648.5492 |
| 78 | HEMO_64_5402 | 134 | 100 | 64 | 15 | 5402 | 4731.8395 |
| 79 | HPT_207_121015 | 135 | 101 | 207, 211 | 5, 9 | 6502 & 6513 | 7034.6887 |
| 80 | HRG_125_5402 | 136 | 102 | 125 | 5 | 5402 | 4218.7401 |
| 81 | IC1_238_5412 | 137 | 103 | 238 | 6 | 5412 | 3259.2655 |
| 82 | IC1_253_5402 | 137 | 104 | 253 | 4 | 5402 | 4304.8575 |
| 83 | IC1_253_5412 | 137 | 104 | 253 | 4 | 5412 | 4450.9154 |
| 84 | IC1_253_6503 | 137 | 104 | 253 | 4 | 6503 | 4961.0851 |
| 85 | IC1_253_6513 | 137 | 104 | 253 | 4 | 6513 | 5107.143 |
| 86 | IC1_352_5402 | 137 | 105 | 352 | 9 | 5402 | 4517.1303 |
| 87 | IGA12_144_3500 | 138 & 139 | 106 | 144 (P01876) or | 18 | 3500 | 4464.1462 |
| | | | | 131 (P01877) | | | |
| 88 | IGG1_297_3410 | 140 | 107 | 180 | 5 | 3410 | 2633.0385 |
| 89 | IGG1_297_3500 | 140 | 107 | 180 | 5 | 3500 | 2690.06 |
| 90 | IGG1_297_3510 | 140 | 107 | 180 | 5 | 3510 | 2836.1179 |
| 91 | IGG2_297_3500 | 141 | 108 | 176 | 5 | 3500 | 2658.0702 |
| 92 | IGM_439_9200 | 142 | 109 | 440 | 9 | 9200 | 4228.7318 |
| 93 | KLKB1_494_6503 | 143 | 110 | 494 | 6 | 6503 | 5107.1769 |
| 94 | QUANTPEP- | 144 | 111 | N/A | N/A | N/A | 1178.6659 |
| | A2GL_DLLLPQPDLR | | | | | | |
| 95 | QUANTPEP- | 145 | 112 | N/A | N/A | N/A | 1234.6809 |
| | APOA1_DLATVYVDVLK | | | | | | |
| 96 | QUANTPEP- | 146 | 113 | N/A | N/A | N/A | 816.48576 |
| | APOM_AFLLTPR | | | | | | |
| 97 | QUANTPEP- | 147 | 114 | N/A | N/A | N/A | 1121.6193 |
| | B2M_VNHVTLSQPK | | | | | | |
| 98 | QUANTPEP- | 148 | 115 | N/A | N/A | N/A | 1542.7566 |
| | FINC_SYTITGLQPGTDYK | | | | | | |
| 99 | QUANTPEP- | 149 | 116 | N/A | N/A | N/A | 2454.1438 |
| | TTR_TSESGELHGLTTEEEFVEGIYK | | | | | | |
| 100 | SHBG_380_5402 | 150 | 117 | 380 | 8 | 5402 | 3247.3131 |
| 101 | TRFE_432_5401 | 151 | 118 | 432 | 12 | 5401 | 3389.4212 |
| 102 | VTNC_169_5401 | 152 | 119 | 169 | 1 | 5401 | 2824.1431 |

TABLE 17A
Peptide Structures After LASSO Shrinkage; Model 1: Healthy vs.
Pancreatic Cancer

| | | (Protein) | (Peptide) |
|---|---|---|---|
| PS-ID | | SEQ ID | SEQ ID |
| NO. | PS-NAME | NO. | NO. |
| 86 | IC1_352_5402 | 137 | 105 |
| 96 | QUANTPEP-APOM_AFLLTPR | 146 | 113 |
| 84 | IC1_253_6503 | 137 | 104 |
| 101 | TRFE_432_5401 | 151 | 118 |
| 91 | IGG2_297_3500 | 141 | 108 |
| 71 | C1S_174_5402 | 130 | 94 |
| 94 | QUANTPEP-A2GL_DLLLPQPDLR | 144 | 111 |
| 97 | QUANTPEP-B2M_VNHVTLSQPK | 147 | 114 |
| 54 | A2MG_247_5200 | 122 | 81 |
| 79 | HPT_207_121015 | 135 | 101 |
| 81 | IC1_238_5412 | 137 | 103 |
| 99 | QUANTPEP- | 149 | 116 |
| | TTR_TSESGELHGLTTEEEFVEGIYK | | |
| 61 | AACT_271_6512 | 123 | 85 |
| 49 | A1AT_107_6512 | 120 | 77 |
| 95 | QUANTPEP- | 145 | 112 |
| | APOA1_DLATVYVDVLK | | |
| 50 | A1AT_107_NONGLYCOSYLATED | 120 | 77 |
| 98 | QUANTPEP- | 148 | 115 |
| | FINC_SYTITGLQPGTDYK | | |
| 92 | IGM_439_9200 | 142 | 109 |
| 90 | IGG1_297_3510 | 140 | 107 |
| 87 | IGA12_144_3500 | 138&139 | 106 |
| 64 | AGP12_72_7601 | 125&126 | 88 |
| 63 | AGP12_56_5412 | 125&126 | 87 |

TABLE 17B
Peptide Structures After LASSO Shrinkage; Model 2: Healthy/Benign
Pancreatitis vs. Pancreatic Cancer

| | | (Protein) | (Peptide) |
|---|---|---|---|
| PS-ID | | SEQ ID | SEQ ID |
| NO. | PS-NAME | NO. | NO. |
| 86 | IC1_352_5402 | 137 | 105 |
| 96 | QUANTPEP-APOM_AFLLTPR | 146 | 113 |
| 101 | TRFE_432_5401 | 151 | 118 |
| 69 | APOM_135_5401 | 129 | 93 |
| 73 | CO5_741_5401 | 132 | 96 |
| 48 | A1AT_107_5412 | 120 | 77 |
| 84 | IC1_253_6503 | 137 | 104 |
| 91 | IGG2_297_3500 | 141 | 108 |
| 64 | AGP12_72_7601 | 125&126 | 88 |
| 61 | AACT_271_6512 | 123 | 85 |
| 72 | CERU_397_5412 | 131 | 95 |
| 57 | A2MG_55_5412 | 122 | 83 |
| 62 | AGP1_93_7614 | 124 | 86 |
| 52 | A1BG_179_5402 | 121 | 79 |
| 100 | SHBG_380_5402 | 150 | 117 |
| 71 | C1S_174_5402 | 130 | 94 |
| 88 | IGG1_297_3410 | 140 | 107 |
| 94 | QUANTPEP-A2GL_DLLLPQPDLR | 144 | 111 |
| 63 | AGP12_56_5412 | 125&126 | 87 |

TABLE 17C
Peptide Structures After LASSO Shrinkage; Model 3: Healthy/Benign
Pancreatitis vs. Early Stage Pancreatic Cancer

| | | (Protein) | (Peptide) |
|---|---|---|---|
| PS-ID | | SEQ ID | SEQ ID |
| NO. | PS NAME | NO. | NO. |
| 96 | QUANTPEP-APOM_AFLLTPR | 146 | 113 |
| 86 | IC1_352_5402 | 137 | 105 |
| 101 | TRFE_432_5401 | 151 | 118 |
| 52 | A1BG_179_5402 | 121 | 79 |
| 69 | APOM_135_5401 | 129 | 93 |
| 91 | IGG2_297_3500 | 141 | 108 |
| 71 | C1S_174_5402 | 130 | 94 |
| 94 | QUANTPEP-A2GL_DLLLPQPDLR | 144 | 111 |
| 48 | A1AT_107_5412 | 120 | 77 |
| 73 | CO5_741_5401 | 132 | 96 |
| 64 | AGP12_72_7601 | 125&126 | 88 |
| 61 | AACT_271_6512 | 123 | 85 |
| 68 | APOH_253_5412 | 128 | 92 |
| 66 | APOB_3895_5401 | 127 | 90 |
| 99 | QUANTPEP- | 149 | 116 |
| | TTR_TSESGELHGLTTEEEFVEGIYK | | |
| 72 | CERU_397_5412 | 131 | 95 |
| 89 | IGG1_297_3500 | 140 | 107 |

[0640] In one or more embodiments, step 1704 may be implemented using a binary classification model (e.g., a regression model). In some examples, the regression model may be, for example, penalized multivariable regression model. In various embodiments, the disease indicator may be computed using a weight coefficient associated with each peptide structure of the at least 1 peptide structure, the weight coefficient of a corresponding peptide structure of the at least 1 peptide structure may indicate the relative significance of the corresponding peptide structure to the disease indicator.

[0641] In some embodiments, step 1704 may include computing a peptide structure profile for the biological sample that identifies a weighted value for each peptide structure of the at least 1 peptide structure. The weighted value for a peptide structure of the at least 1 peptide structure may be a product of a quantification metric for the peptide structure identified from the peptide structure data and a weight coefficient for the peptide structure. The disease indicator may be computed using the peptide structure profile. For example, the disease indicator may be a logit equal to the sum of the weighted values for the peptide structures plus an intercept value. The intercept value may be determined during the training of the model.

[0642] In various embodiments, the disease indicator comprises a probability that the biological sample is positive for the PC disease state and the supervised machine learning model is configured to generate an output that identifies the biological sample as either evidencing (“positive for”) the PC disease state when the disease indicator is greater than a selected threshold or not evidencing (“negative for”) the PC disease state when the disease indicator is not greater than the selected threshold. The selected threshold may be, for example, 0.30, 0.35, 0.40, 0.45, 0.50, 0.55, or some other threshold. In one or more embodiments, the selected threshold is 0.5.

[0643] Step 506 includes generating a final output based on the disease indicator. The final output may include a diagnosis output, such as, for example, diagnosis output 324 in FIG. 3. The diagnosis output may include the disease indicator, or a diagnosis made based on the disease indicator. The diagnosis may be, for example, “positive” for the PC disease state if the biological sample evidences the PC disease state based on the disease indicator. The diagnosis may be, for example, “negative” if the biological sample does not evidence the PC disease state based on the disease indicator. A negative diagnosis may mean that the biological sample has a non-pancreatic cancer (PC) state (e.g., healthy, control, etc.). The negative diagnosis for the PC disease state can include at least one of a healthy state, a benign pancreatitis state, or a control state.

[0644] Generating the diagnosis output in step 1706 may include determining that the score falls above a selected threshold and generating a positive diagnosis for the PC disease state. Alternatively, step 1706 can include determining that the score falls below a selected threshold and generating a negative diagnosis for the PC disease state. In some scoring systems, the score can include a probability score and the selected threshold can be 0.5. In other scoring systems, the selected threshold can fall within a range between 0.4 and 0.6.

[0645] In one or more embodiments, the final output in step 1706 may include a treatment output if the diagnosis output indicates a positive diagnosis for the PC disease state. The treatment output may include, for example, at least one of an identification of a treatment for the subject, a treatment plan for administering the treatment, or both. Treatment for pancreatic cancer may include, for example, but is not limited to, at least one of radiation therapy, chemoradiotherapy, surgery, a targeted drug therapy, or some other form of treatment. The treatment plan may include, for example, but is not limited to, a timeline or schedule for administering the treatment, dosing information, other treatment-related information, or a combination thereof.

### VI.B. General Methodology System for Diagnosis of NSCLC

[0646] In some embodiments, the methods provided herein are useful for diagnosing NSCLC. In some embodiments, the method is useful for diagnosing early-stage NSCLC. In some embodiments, the method is useful for diagnosing late-stage NSCLC. In some embodiments, the method comprises diagnosing an individual with NSCLC, wherein the individual has stage 0, stage I, stage II, stage III, or stage IV NSCLC. In some embodiments, the method comprises diagnosing an individual with NSCLC before the onset of disease symptoms and pathological conditions of NSCLC. In some embodiments, the method comprises diagnosing an individual with NSCLC after the onset of disease symptoms and pathological conditions of NSCLC. In some embodiments, the method comprises diagnosing an individual with NSCLC during disease symptoms and pathological conditions of NSCLC. In some embodiments, the method comprises diagnosing an individual with NSCLC before disease progression. In some embodiments, the method comprising diagnosing an individual with NSCLC before metastasis.

[0647] In some embodiments, the method comprises classifying a biological sample with respect to a plurality of states associated with NSCLC based upon one or more peptide structures provided in Table 35 and/or Table 40. In some embodiments, the method comprises inputting quantification data identified from peptide structure data for a set of peptides and/or glycopeptides into one or more machine-learning model trained to identify a disease indicator. In some embodiments, the method comprises classifying the sample as having NSCLC or not having NSCLC based upon the disease indicator. In some embodiments, the peptide structure data comprises one or more peptide structure provided in Table 35 and/or Table 40. In some embodiments, the glycopeptide structure data comprises one or more glycopeptide structure provided in Table 35 and/or Table 40. In some embodiments, the presence, absence, and/or amount of one or more peptides and/or glycopeptide is determined by MRM-MS. In some embodiments, the method comprises classifying a biological sample with respect to a plurality of states associated with NSCLC, based upon one or more peptide structure provided in Table 35 or Table 40, and selecting a treatment for NSCLC based upon the classification. In some embodiments, the method comprises classifying a biological sample with respect to a plurality of states associated with NSCLC, based upon one or more peptide structure provided in Table 35 or Table 40, and administering a treatment for NSCLC based upon the classification. In some embodiments, the method comprises classifying a biological sample with respect to a plurality of states associated with NSCLC, based upon one or more glycopeptide structure provided in Table 35 or Table 40, and administering a treatment for NSCLC based upon the classification.

[0648] In some embodiments, the diagnosis is based upon presence and/or amount of at least one, at least two, at least three, at least four, at least five, at least ten, at least 15, at least 20, or at least 25 peptide structures from Table 35. In some embodiments, the diagnosis is based upon presence and/or amount of at least one, at least two, at least three, at least four, at least five, at least ten, at least 15, at least 20, or at least 25 glycopeptides from Table 35. In some embodiments, the diagnosis is based upon the presence and/or amount of one or more peptides and/or glycopeptides comprising the amino acid sequence of SEQ ID NOs: 224-257. In some embodiments, the diagnosis is based upon the presence and/or amount of one or more glycopeptides comprising the amino acid sequence of SEQ ID NOs: 224-257. In some embodiments, the diagnosis is based upon the presence and/or amount of one or more peptides and/or glycopeptide comprising the amino acid sequence of SEQ ID NOs: 224-257 set forth in Table 35. In some embodiments, the diagnosis is based upon the presence and/or amount of one or more glycopeptides comprising the amino acid sequence of SEQ ID NOs: 224-257 along with the associated glycan set forth in Table 35. In some embodiments, the diagnosis is based upon the presence and/or amount of two or more peptides and/or glycopeptides comprising the amino acid sequence of SEQ ID NOs: 224-257 along with the associated glycan set forth in Table 35. In some embodiments, the diagnosis is based upon the presence and/or amount of three or more peptides and/or glycopeptides comprising the amino acid sequence of SEQ ID NOs: 224-257 along with the associated glycan set forth in Table 35. In some embodiments, the diagnosis is based upon the presence and/or amount of four or more peptides and/or glycopeptides comprising the amino acid sequence of SEQ ID NOs: 224-257 along with the associated glycan set forth in Table 35. In some embodiments, the diagnosis is based upon the presence and/or amount of five or more peptides and/or glycopeptides comprising the amino acid sequence of SEQ ID NOs: 224-257 along with the associated glycan set forth in Table 35. In some embodiments, the diagnosis is based upon the presence and/or amount of 10 or more peptides and/or glycopeptides comprising the amino acid sequence of SEQ ID NOs: 224-257 along with the associated glycan set forth in Table 35. In some embodiments, the diagnosis is based upon the presence and/or amount of 15 or more peptides and/or glycopeptides comprising the amino acid sequence of SEQ ID NOs: 224-257 along with the associated glycan set forth in Table 35. In some embodiments, the diagnosis is based upon the presence and/or amount of 20 or more peptides and/or glycopeptides comprising the amino acid sequence of SEQ ID NOs: 224-257 along with the associated glycan set forth in Table 35. In some embodiments, the diagnosis is based upon the presence and/or amount of 25 or more peptides and/or glycopeptides comprising the amino acid sequence of SEQ ID NOs: 224-257 along with the associated glycan set forth in Table 35. In some embodiments, the diagnosis is based upon the presence and/or amount of each of the peptides and/or glycopeptides comprising the amino acid sequence of SEQ ID NOs: 224-257 along with the associated glycan set forth in Table 35. In some embodiments, the method comprises classifying a biological sample with respect to a plurality of states associated with NSCLC based upon one or more peptide structure provided in Table 35 and selecting a treatment for NSCLC based upon the classification. In some embodiments, the method comprises classifying a biological sample with respect to a plurality of states associated with NSCLC based upon one or more peptide structure provided in Table 35 and administering a treatment for NSCLC based upon the classification.

[0649] In some embodiments, the diagnosis is based upon the presence and/or amount of one or more peptides and/or glycopeptides consisting of the amino acid sequence of SEQ ID NOs: 224-257 set forth in Table 35. In some embodiments, the diagnosis is based upon the presence and/or amount of one or more glycopeptides consisting of the amino acid sequence of SEQ ID NOs: 224-257 set forth in Table 35. In some embodiments, the diagnosis is based upon the presence and/or amount of one or more glycopeptides consisting of the amino acid sequence of SEQ ID NOs: 224-257 along with the associated glycan set forth in Table 35. In some embodiments, the diagnosis is based upon the presence and/or amount of two or more peptides and/or glycopeptides consisting of the amino acid sequence of SEQ ID NOs: 224-257 along with the associated glycan set forth in Table 35. In some embodiments, the diagnosis is based upon the presence and/or amount of three or more peptides and/or glycopeptides consisting of the amino acid sequence of SEQ ID NOs: 224-257 along with the associated glycan set forth in Table 35. In some embodiments, the diagnosis is based upon the presence and/or amount of four or more peptides and/or glycopeptides consisting of the amino acid sequence of SEQ ID NOs: 224-257 along with the associated glycan set forth in Table 35. In some embodiments, the diagnosis is based upon the presence and/or amount of five or more peptides and/or glycopeptides consisting of the amino acid sequence of SEQ ID NOs: 224-257 along with the associated glycan set forth in Table 35. In some embodiments, the diagnosis is based upon the presence and/or amount of 10 or more peptides and/or glycopeptides consisting of the amino acid sequence of SEQ ID NOs: 224-257 along with the associated glycan set forth in Table 35. In some embodiments, the diagnosis is based upon the presence and/or amount of 15 or more peptides and/or glycopeptides consisting of the amino acid sequence of SEQ ID NOs: 224-257 along with the associated glycan set forth in Table 35. In some embodiments, the diagnosis is based upon the presence and/or amount of 20 or more peptides and/or glycopeptides consisting of the amino acid sequence of SEQ ID NOs: 224-257 along with the associated glycan set forth in Table 35. In some embodiments, the diagnosis is based upon the presence and/or amount of 25 or more peptides and/or glycopeptides consisting of the amino acid sequence of SEQ ID NOs: 224-257 along with the associated glycan set forth in Table 35. In some embodiments, the diagnosis is based upon the presence and/or amount of each of the peptides and/or glycopeptides consisting of the amino acid sequence of SEQ ID NOs: 224-257 along with the associated glycan set forth in Table 35. In some embodiments, the method comprises classifying a biological sample with respect to a plurality of states associated with NSCLC based upon one or more peptide and/or glycopeptide structure provided in Table 35 and selecting a treatment for NSCLC based upon the classification. In some embodiments, the method comprises classifying a biological sample with respect to a plurality of states associated with NSCLC based upon one or more peptide and/or glycopeptide structure provided in Table 35 and administering a treatment for NSCLC based upon the classification.

[0650] In some embodiments, the method comprises determining whether an individual has NSCLC by inputting quantification data from peptide and/or glycopeptide structure data for a set of peptide structures comprising one or more, two or more, three or more, four or more, five or more, 10 or more, 15 or more, 20 or more, 25 or more, or each of the peptides and/or glycopeptide consisting of the amino acid sequence of SEQ ID NOs: 224-257 into a machine-learning model trained to identify a disease indicator, identifying by the machine-learning model, the disease indicator, and classifying the biological sample with respect to a plurality of states associated with NSCLC based upon the disease indicator. In some embodiments, the disease indicator comprises one or more scores that indicate a probability that the subject falls within one of the states associated with NSCLC (e.g., having NSCLC or not having NSCLC). In some embodiments, the machine-learning model is a regularized regression model. In some embodiments, the regularized model comprises a LASSO regression model. In some embodiments, the peptide structures are detected using LC-MS. In some embodiments, the LC-MS comprises LC-MS/MS and LC-MS/MS running in a MRM mode. In some embodiments, the method comprises selecting a treatment for NSCLC based upon the classification described herein. In some embodiments, the method comprises administering a treatment for NSCLC based upon the classification described herein.

[0651] In some embodiments, the diagnosis is based upon presence and/or amount of at least one, at least two, at least three, at least four, at least five, at least 10, at least 15, at least 20, or at least 25 peptide structures from Table 35. In some embodiments, the diagnosis is based upon the presence and/or amount of one or more peptides and/or glycopeptides comprising the amino acid sequence of SEQ ID NOs: 258-296. In some embodiments, the diagnosis is based upon the presence and/or amount of one or more glycopeptides comprising the amino acid sequence of SEQ ID NOs: 258-296. In some embodiments, the diagnosis is based upon the presence and/or amount of one or more peptides and/or glycopeptide comprising the amino acid sequence of SEQ ID NOs: 258-296 set forth in Table 35. In some embodiments, the diagnosis is based upon the presence and/or amount of one or more glycopeptide comprising the amino acid sequence of SEQ ID NOs: 258-296 set forth in Table 35. In some embodiments, the diagnosis is based upon the presence and/or amount of one or more glycopeptides comprising the amino acid sequence of SEQ ID NOs: 258-296 along with the associated glycan set forth in Table 35. In some embodiments, the diagnosis is based upon the presence and/or amount of two or more peptides and/or glycopeptides comprising the amino acid sequence of SEQ ID NOs: 258-296 along with the associated glycan set forth in Table 35. In some embodiments, the diagnosis is based upon the presence and/or amount of three or more peptides and/or glycopeptides comprising the amino acid sequence of SEQ ID NOs: 258-296 along with the associated glycan set forth in Table 35. In some embodiments, the diagnosis is based upon the presence and/or amount of four or more peptides and/or glycopeptides comprising the amino acid sequence of SEQ ID NOs: 258-296 along with the associated glycan set forth in Table 35. In some embodiments, the diagnosis is based upon the presence and/or amount of five or more peptides and/or glycopeptides comprising the amino acid sequence of SEQ ID NOs: 258-296 along with the associated glycan set forth in Table 35. In some embodiments, the diagnosis is based upon the presence and/or amount of 10 or more peptides and/or glycopeptides comprising the amino acid sequence of SEQ ID NOs: 258-296 along with the associated glycan set forth in Table 35. In some embodiments, the diagnosis is based upon the presence and/or amount of 15 or more peptides and/or glycopeptides comprising the amino acid sequence of SEQ ID NOs: 258-296 along with the associated glycan set forth in Table 35. In some embodiments, the diagnosis is based upon the presence and/or amount of 20 or more peptides and/or glycopeptides comprising the amino acid sequence of SEQ ID NOs: 258-296 along with the associated glycan set forth in Table 35. In some embodiments, the diagnosis is based upon the presence and/or amount of 25 or more peptides and/or glycopeptides comprising the amino acid sequence of SEQ ID NOs: 258-296 along with the associated glycan set forth in Table 35. In some embodiments, the diagnosis is based upon the presence and/or amount of each of the peptides and/or glycopeptides comprising the amino acid sequence of SEQ ID NOs: 258-296 along with the associated glycan set forth in Table 35. In some embodiments, the method comprises classifying a biological sample with respect to a plurality of states associated with NSCLC based upon one or more peptide and/or glycopeptide structure provided in Table 35 and selecting a treatment for NSCLC based upon the classification. In some embodiments, the method comprises classifying a biological sample with respect to a plurality of states associated with NSCLC based upon one or more peptide and/or glycopeptide structure provided in Table 35 and administering a treatment for NSCLC based upon the classification.

[0652] In some embodiments, the diagnosis is based upon the presence and/or amount of one or more peptides and/or glycopeptides consisting of the amino acid sequence of SEQ ID NOs: 258-296 set forth in Table 35. In some embodiments, the diagnosis is based upon the presence and/or amount of one or more glycopeptides consisting of the amino acid sequence of SEQ ID NOs: 258-296 set forth in Table 35. In some embodiments, the diagnosis is based upon the presence and/or amount of one or more glycopeptides consisting of the amino acid sequence of SEQ ID NOs: 258-296 along with the associated glycan set forth in Table 35. In some embodiments, the diagnosis is based upon the presence and/or amount of two or more peptides and/or glycopeptides consisting of the amino acid sequence of SEQ ID NOs: 258-296 along with the associated glycan set forth in Table 35. In some embodiments, the diagnosis is based upon the presence and/or amount of three or more peptides and/or glycopeptides consisting of the amino acid sequence of SEQ ID NOs: 258-296 along with the associated glycan set forth in Table 35. In some embodiments, the diagnosis is based upon the presence and/or amount of four or more peptides and/or glycopeptides consisting of the amino acid sequence of SEQ ID NOs: 258-296 along with the associated glycan set forth in Table 35. In some embodiments, the diagnosis is based upon the presence and/or amount of five or more peptides and/or glycopeptides consisting of the amino acid sequence of SEQ ID NOs: 258-296 along with the associated glycan set forth in Table 35. In some embodiments, the diagnosis is based upon the presence and/or amount of 10 or more peptides and/or glycopeptides consisting of the amino acid sequence of SEQ ID NOs: 258-296 along with the associated glycan set forth in Table 35. In some embodiments, the diagnosis is based upon the presence and/or amount of 15 or more peptides and/or glycopeptides consisting of the amino acid sequence of SEQ ID NOs: 258-296 along with the associated glycan set forth in Table 35. In some embodiments, the diagnosis is based upon the presence and/or amount of 20 or more peptides and/or glycopeptides consisting of the amino acid sequence of SEQ ID NOs: 258-296 along with the associated glycan set forth in Table 35. In some embodiments, the diagnosis is based upon the presence and/or amount of 25 or more peptides and/or glycopeptides consisting of the amino acid sequence of SEQ ID NOs: 258-296 along with the associated glycan set forth in Table 35. In some embodiments, the diagnosis is based upon the presence and/or amount of each of the peptides and/or glycopeptides consisting of the amino acid sequence of SEQ ID NOs: 258-296 along with the associated glycan set forth in Table 35. In some embodiments, the method comprises classifying a biological sample with respect to a plurality of states associated with NSCLC based upon one or more peptide and/or glycopeptide structure provided in Table 35 and selecting a treatment for NSCLC based upon the classification. In some embodiments, the method comprises classifying a biological sample with respect to a plurality of states associated with NSCLC based upon one or more peptide and/or glycopeptide structure provided in Table 35 and administering a treatment for NSCLC based upon the classification.

[0653] In some embodiments, the method comprises determining whether an individual has NSCLC or is likely to develop NSCLC by inputting quantification data from peptide and/or glycopeptide structure data for a set of peptide structures comprising one or more, two or more, three or more, four or more, five or more, 10 or more, 15 or more, 20 or more, 25 or more, or each of the peptides and/or glycopeptides consisting of the amino acid sequence of SEQ ID NOs: 258-296 into a machine-learning model trained to identify a disease indicator, identifying by the machine-learning model, the disease indicator, and classifying the biological sample with respect to a plurality of states associated with NSCLC based upon the disease indicator. In some embodiments, the disease indicator comprises one or more scores that indicate a probability that the subject falls within one of the states associated with NSCLC (e.g., having NSCLC or not having NSCLC). In some embodiments, the machine-learning model is a regularized regression model. In some embodiments, the regularized regression model comprises a LASSO regression model. In some embodiments, the peptide structures are detected using LC-MS. In some embodiments, the LC-MS comprises LC-MS/MS and LC-MS/MS running in a MRM mode. In some embodiments, the method comprises selecting a treatment for NSCLC based upon the classification described herein. In some embodiments, the method comprises administering a treatment for NSCLC based upon the classification described herein.

[0654] In some embodiments, the diagnosis is based upon presence and/or amount of at least one, at least two, at least three, at least four, at least five, at least 10, or at least 15 peptide structures from Table 40. In some embodiments, the diagnosis is based upon presence and/or amount of at least one, at least two, at least three, at least four, at least five, at least 10, or at least 15 glycopeptides from Table 40. In some embodiments, the diagnosis is based upon the presence and/or amount of one or more peptides and/or glycopeptides comprising the amino acid sequence of SEQ ID NOs: 229, 231-234, 236, 239, 241, 244-245, 247-255. In some embodiments, the diagnosis is based upon the presence and/or amount of one or more glycopeptides comprising the amino acid sequence of SEQ ID NOs: 229, 231-234, 236, 239, 241, 244-245, 247-255. In some embodiments, the diagnosis is based upon the presence and/or amount of one or more peptides and/or glycopeptide comprising the amino acid sequence of SEQ ID NOs: 229, 231-234, 236, 239, 241, 244-245, 247-255 set forth in Table 40. In some embodiments, the diagnosis is based upon the presence and/or amount of one or more glycopeptides comprising the amino acid sequence of SEQ ID NOs: 229, 231-234, 236, 239, 241, 244-245, 247-255 along with the associated glycan set forth in Table 35. In some embodiments, the diagnosis is based upon the presence and/or amount of two or more peptides and/or glycopeptides comprising the amino acid sequence of SEQ ID NOs: 229, 231-234, 236, 239, 241, 244-245, 247-255 along with the associated glycan set forth in Table 35. In some embodiments, the diagnosis is based upon the presence and/or amount of three or more peptides and/or glycopeptides comprising the amino acid sequence of SEQ ID NOs: 229, 231-234, 236, 239, 241, 244-245, 247-255 along with the associated glycan set forth in Table 35. In some embodiments, the diagnosis is based upon the presence and/or amount of four or more peptides and/or glycopeptides comprising the amino acid sequence of SEQ ID NOs: 229, 231-234, 236, 239, 241, 244-245, 247-255 along with the associated glycan set forth in Table 35. In some embodiments, the diagnosis is based upon the presence and/or amount of five or more peptides and/or glycopeptides comprising the amino acid sequence of SEQ ID NOs: 229, 231-234, 236, 239, 241, 244-245, 247-255 along with the associated glycan set forth in Table 35. In some embodiments, the diagnosis is based upon the presence and/or amount of 10 or more peptides and/or glycopeptides comprising the amino acid sequence of SEQ ID NOs: 229, 231-234, 236, 239, 241, 244-245, 247-255 along with the associated glycan set forth in Table 35. In some embodiments, the diagnosis is based upon the presence and/or amount of 15 or more peptides and/or glycopeptides comprising the amino acid sequence of SEQ ID NOs: 229, 231-234, 236, 239, 241, 244-245, 247-255 along with the associated glycan set forth in Table 35. In some embodiments, the diagnosis is based upon the presence and/or amount of each of the peptides and/or glycopeptides comprising the amino acid sequence of SEQ ID NOs: 229, 231-234, 236, 239, 241, 244-245, 247-255 along with the associated glycan set forth in Table 35. In some embodiments, the method comprises classifying a biological sample with respect to a plurality of states associated with NSCLC based upon one or more peptide and/or glycopeptide structure provided in Table 40 and selecting a treatment for NSCLC based upon the classification. In some embodiments, the method comprises classifying a biological sample with respect to a plurality of states associated with NSCLC based upon one or more peptide and/or glycopeptide structure provided in Table 40 and administering a treatment for NSCLC based upon the classification.

[0655] In some embodiments, the diagnosis is based upon the presence and/or amount of one or more peptides and/or glycopeptides consisting of the amino acid sequence of SEQ ID NOs: 229, 231-234, 236, 239, 241, 244-245, 247-255 set forth in Table 40. In some embodiments, the diagnosis is based upon the presence and/or amount of one or more glycopeptides consisting of the amino acid sequence of SEQ ID NOs: 229, 231-234, 236, 239, 241, 244-245, 247-255 set forth in Table 40. In some embodiments, the diagnosis is based upon the presence and/or amount of one or more glycopeptides consisting of the amino acid sequence of SEQ ID NOs: 229, 231-234, 236, 239, 241, 244-245, 247-255 along with the associated glycan set forth in Table 35. In some embodiments, the diagnosis is based upon the presence and/or amount of two or more peptides and/or glycopeptides consisting of the amino acid sequence of SEQ ID NOs: 229, 231-234, 236, 239, 241, 244-245, 247-255 along with the associated glycan set forth in Table 35. In some embodiments, the diagnosis is based upon the presence and/or amount of three or more peptides and/or glycopeptides consisting of the amino acid sequence of SEQ ID NOs: 229, 231-234, 236, 239, 241, 244-245, 247-255 along with the associated glycan set forth in Table 35. In some embodiments, the diagnosis is based upon the presence and/or amount of four or more peptides and/or glycopeptides consisting of the amino acid sequence of SEQ ID NOs: 229, 231-234, 236, 239, 241, 244-245, 247-255 along with the associated glycan set forth in Table 35. In some embodiments, the diagnosis is based upon the presence and/or amount of five or more peptides and/or glycopeptides consisting of the amino acid sequence of SEQ ID NOs: 229, 231-234, 236, 239, 241, 244-245, 247-255 along with the associated glycan set forth in Table 35. In some embodiments, the diagnosis is based upon the presence and/or amount of 10 or more peptides and/or glycopeptides consisting of the amino acid sequence of SEQ ID NOs: 229, 231-234, 236, 239, 241, 244-245, 247-255 along with the associated glycan set forth in Table 35. In some embodiments, the diagnosis is based upon the presence and/or amount of 15 or more peptides and/or glycopeptides consisting of the amino acid sequence of SEQ ID NOs: 229, 231-234, 236, 239, 241, 244-245, 247-255 along with the associated glycan set forth in Table 35. In some embodiments, the diagnosis is based upon the presence and/or amount of each of the peptides and/or glycopeptides consisting of the amino acid sequence of SEQ ID NOs: 229, 231-234, 236, 239, 241, 244-245, 247-255 along with the associated glycan set forth in Table 35. In some embodiments, the method comprises classifying a biological sample with respect to a plurality of states associated with NSCLC based upon one or more peptide and/or glycopeptide structure provided in Table 35 and selecting a treatment for NSCLC based upon the classification. In some embodiments, the method comprises classifying a biological sample with respect to a plurality of states associated with NSCLC based upon one or more peptide and/or glycopeptide structure provided in Table 35 and administering a treatment for NSCLC based upon the classification.

[0656] In some embodiments, the method comprises determining whether an individual has NSCLC by inputting quantification data from peptide and/or glycopeptide structure data for a set of peptide structures comprising one or more, two or more, three or more, four or more, five or more, 10 or more, 15 or more, or each of the peptides and/or glycopeptides consisting of the amino acid sequence of SEQ ID NOs: 229, 231-234, 236, 239, 241, 244-245, 247-255 into a machine-learning model trained to identify a disease indicator, identifying by the machine-learning model, the disease indicator, and classifying the biological sample with respect to a plurality of states associated with NSCLC based upon the disease indicator. In some embodiments, the disease indicator comprises one or more scores that indicate a probability that the subject falls within one of the states associated with NSCLC (e.g., having NSCLC or not having NSCLC). In some embodiments, the machine-learning model is a regularized regression model. In some embodiments, the regularized regression model comprises a LASSO regression model. In some embodiments, the peptide structures are detected using LC-MS. In some embodiments, the LC-MS comprises LC-MS/MS and LC-MS/MS running in a MRM mode. In some embodiments, the method comprises selecting a treatment for NSCLC based upon the classification described herein. In some embodiments, the method comprises administering a treatment for NSCLC based upon the classification described herein.

[0657] In some embodiments, the method comprises determining whether an individual has NSCLC by inputting quantification data from peptide and/or glycopeptide structure data for a set of peptide structures comprising one or more, two or more, three or more, four or more, five or more, 10 or more, 15 or more, or each of the peptides and/or glycopeptides consisting of the amino acid sequence of SEQ ID NOs: 224-296 into a machine-learning model trained to identify a disease indicator, identifying by the machine-learning model, the disease indicator, and classifying the biological sample with respect to a plurality of states associated with NSCLC based upon the disease indicator. In some embodiments, the peptide structures are detected using LC-MS. In some embodiments, the LC-MS comprises LC-MS/MS and LC-MS/MS running in a MRM mode. In some embodiments, the quantification data from peptide and/or glycopeptide comprises a fold-change in peptide and/or glycopeptide abundance for different sample conditions (e.g., NSCLC vs healthy control sample). In some embodiments, the fold-change in peptide and/or glycopeptide abundance is greater than 1, wherein the peptide and/or glycopeptide abundance is increased in the NSCLC sample compared to healthy control sample. In some embodiments, the fold-change in peptide and/or glycopeptide abundance is less than 1, wherein the peptide and/or glycopeptide abundance is decreased in the NSCLC sample compared to healthy control sample. In some embodiments, the fold-change in peptide and/or glycopeptide abundance is equal to 1, wherein the peptide and/or glycopeptide abundance is the sample in the NSCLC sample and the healthy control sample. In some embodiments, the fold-change in peptide and/or glycopeptide abundance is about 1.0, about 1.2, about 1.4, about 1.6, about 1.8, about 2.0, about 2.2, about 2.4, about 2.6, about 2.8, about 3.0, about 3.5, about 4, about 5, about 6, about 7, about 8, about 9, or about 10 for the NSCLC sample compared to the healthy control sample. In some embodiments, the fold-change in peptide and/or glycopeptide abundance is more than 1.0, more than 1.2, more than 1.4, more than 1.6, more than 1.8, more than 2.0, more than 2.2, more than 2.4, more than 2.6, more than 2.8, more than 3.0, more than 3.5, more than 4, more than 5, more than 6, more than 7, more than 8, more than 9, or more than 10 for the NSCLC sample compared to the healthy control sample. In some embodiments, the fold-change in peptide and/or glycopeptide abundance is about 0.9, about 0.8, about 0.7, about 0.6, about 0.5, about 0.4, about 0.3, about 0.2, or about 0.1 for the NSCLC sample compared to the healthy control sample. In some embodiments, the fold-change in peptide and/or glycopeptide abundance is less than 0.9, less than 0.8, less than 0.7, less than 0.6, less than 0.5, less than 0.4, less than 0.3, less than 0.2, or less than 0.1 for the NSCLC sample compared to the healthy control sample. In some embodiments, the fold-change in peptide and/or glycopeptide abundance is provided for the amino acid sequence of SEQ ID NOs: 224-296 as set forth by Table 38A and Table 38B. In some embodiments, the method comprises selecting a treatment for NSCLC based upon the quantification data described herein. In some embodiments, the method comprises administering a treatment for NSCLC based upon the quantification data described herein. In some embodiments, the diagnostic methods herein comprise selecting one or more glycopeptide based upon a fold change cutoff between healthy control samples and NSCLC samples. In some embodiments, the selected glycopeptides are used to train a model to diagnose NSCLC.

[0658] In some embodiments, the method comprises determining whether an individual has NSCLC by inputting quantification data from peptide and/or glycopeptide structure data for a set of peptide structures comprising one or more, two or more, three or more, four or more, five or more, 10 or more, 15 or more, or each of the peptides and/or glycopeptides consisting of the amino acid sequence of SEQ ID NOs: 224-257 into a machine-learning model, wherein the machine-learning model comprises a regularized regression model (e.g., LASSO regression model) trained using one or more of a first set of peptide and/or glycopeptide structure coefficients set forth in Table 39 for all stages of NSCLC (stages 1-4), a second set of peptide and/or glycopeptide structure coefficients set forth in Table 39 for early-stage NSCLC (stages 1-2), and a third set of peptide structure coefficients set forth in Table 39 for late-stage NSCLC (stages 3-4). In some embodiments, the first set of peptide structure coefficients used in training the model comprises the amino acid sequence of SEQ ID NOs: 229, 231-234, 236, 239, 241, 244-245, 247-255. In some embodiments, the second set of peptide structure coefficients used in training the model comprises the amino acid sequence of SEQ ID NOs: 224, 227, 233, 238, 240-242, 244, 247-248, 250-255. In some embodiments, the third set of peptide structure coefficients used in training the model comprise the amino acid sequence of SEQ ID NOs: 225-226, 228-230, 233-237, 239, 241-244, 246, 254-257. In some embodiments, the machine-learning model is trained using any one of the set of peptide structure coefficients described herein to identify a disease indicator, identifying by the machine-learning model, the disease indicator, and classifying the biological sample with respect to a plurality of states associated with NSCLC based upon the disease indicator. In some embodiments, the disease indicator comprises one or more scores that indicate a probability that the subject falls within one of the states associated with NSCLC (e.g., having NSCLC or not having NSCLC). In some embodiments, the machine-learning model trained using the first set of peptide structure coefficients is a regularized regression model (e.g., LASSO regression model). In some embodiments, the machine-learning model trained using the second set of peptide structure coefficients is a regularized regression model (e.g., LASSO regression model). In some embodiments, the machine-learning model trained using the third set of peptide structure coefficients is a regularized regression model (e.g., LASSO regression model). In some embodiments, the machine-learning model trained using the first set of peptide structure coefficients comprises a regularized regression model (e.g., LASSO regression model). In some embodiments, the machine-learning model trained using the second set of peptide structure coefficients comprises a regularized regression (e.g., LASSO regression model). In some embodiments, the machine-learning model trained using the third set of peptide structure coefficients comprises a regularized regression model (e.g., LASSO regression model). In some embodiments, the peptide structures are detected using LC-MS. In some embodiments, the LC-MS comprises LC-MS/MS and LC-MS/MS running in a MRM mode. In some embodiments, the method comprises selecting a treatment for NSCLC based upon the classification described herein. In some embodiments, the method comprises administering a treatment for NSCLC based upon the classification described herein.

[0659] In some embodiments, the method comprises determining whether an individual has NSCLC by inputting quantification data from peptide structure data for a set of peptide structures comprising one or more, two or more, three or more, four or more, five or more, 10 or more, 15 or more, or each of the peptides and/or glycopeptides consisting of the amino acid sequence of SEQ ID NOs: 224-257 into a machine-learning model, wherein the machine-learning model consists of a regularized regression model (e.g., LASSO regression model) trained using a first set of peptide structure coefficients set forth in Table 39 for all stages of NSCLC (stages 1-4). In some embodiments, the first set of peptide structure coefficients used in training the model consist of the amino acid sequence of SEQ ID NOs: 229, 231-234, 236, 239, 241, 244-245, 247-255. In some embodiments, the model is trained using the first set of peptide structure coefficients to identify a disease indicator, identifying by the machine-learning model, the disease indicator, and classifying the biological sample with respect to a plurality of states associated with NSCLC based upon the disease indicator. In some embodiments, the disease indicator comprises one or more scores that indicate a probability that the subject falls within one of the states associated with NSCLC (e.g., having NSCLC or not having NSCLC). In some embodiments, the machine-learning model trained using the first set of peptide structure coefficients is a regularized regression model. In some embodiments, the regularized regression model trained using the first set of peptide structure coefficients consists of a LASSO regression model. In some embodiments, the peptide structures are detected using LC-MS. In some embodiments, the LC-MS comprises LC-MS/MS and LC-MS/MS running in a MRM mode. In some embodiments, the method comprises selecting a treatment for NSCLC based upon the classification described herein. In some embodiments, the method comprises administering a treatment for NSCLC based upon the classification described herein.

[0660] In some embodiments, the method comprises determining whether an individual has NSCLC by inputting quantification data from peptide structure data for a set of peptide structures comprising one or more, two or more, three or more, four or more, five or more, 10 or more, 15 or more, or each of the peptides and/or glycopeptides consisting of the amino acid sequence of SEQ ID NOs: 224-257 into a machine-learning model, wherein the machine-learning model consists of a regularized regression model (e.g., LASSO regression model) trained using a second set of peptide structure coefficients set forth in Table 39 for early-stage NSCLC (stages 1-2). In some embodiments, the second set of peptide structure coefficients used in training the machine-learning model consist of the amino acid sequence of SEQ ID NOs: 224, 227, 233, 238, 240-242, 244, 247-248, 250-255. In some embodiments, the machine-learning model is trained using the second set of peptide structure coefficients to identify a disease indicator, identifying by the machine-learning model, the disease indicator, and classifying the biological sample with respect to a plurality of states associated with NSCLC based upon the disease indicator. In some embodiments, the disease indicator comprises one or more scores that indicate a probability that the subject falls within one of the states associated with NSCLC (e.g., having NSCLC or not having NSCLC). In some embodiments, the machine-learning model trained using the second set of peptide structure coefficients is a regularized regression model. In some embodiments, the regularized regression model trained using the second set of peptide structure coefficients consists of a LASSO regression model. In some embodiments, the peptide structure are detected using LC-MS. In some embodiments, the LC-MS comprises LC-MS/MS and LC-MS/MS running in a MRM mode. In some embodiments, the method comprises selecting a treatment for NSCLC based upon the classification described herein. In some embodiments, the method comprises administering a treatment for NSCLC based upon the classification described herein.

[0661] In some embodiments, the method comprises determining whether an individual has NSCLC by inputting quantification data from peptide structure data for a set of peptide structures comprising one or more, two or more, three or more, four or more, five or more, 10 or more, 15 or more, or each of the peptides and/or glycopeptides consisting of the amino acid sequence of SEQ ID NOs: 224-257 into a machine-learning model, wherein the machine-learning model consists of a regularized regression model (e.g., LASSO regression model) trained using a third set of peptide structure coefficients set forth in Table 39 for late-stage NSCLC (stages 3-4). In some embodiments, the third set of peptide structure coefficients used in training the model consist of the amino acid sequence of SEQ ID NOs: 225-226, 228-230, 233-237, 239, 241-244, 246, 254-257. In some embodiments, the third set of peptide structure coefficients used in training the model consist of the amino acid sequence of SEQ ID NOs: 225-226, 228-230, 233-237, 239, 241-244, 246, 254-257. In some embodiments, the model is trained using the third set of peptide structure coefficients to identify a disease indicator, identifying by the machine-learning model, the disease indicator, and classifying the biological sample with respect to a plurality of states associated with NSCLC based upon the disease indicator. In some embodiments, the disease indicator comprises one or more scores that indicate a probability that the subject falls within one of the states associated with NSCLC (e.g., having NSCLC or not having NSCLC). In some embodiments, the machine-learning model trained using the third set of peptide structure coefficients is a regularized regression model. In some embodiments, the regularized regression model trained using the third set of peptide structure coefficients consists of a LASSO regression model. In some embodiments, the peptide structure are detected using LC-MS. In some embodiments, the LC-MS comprises LC-MS/MS and LC-MS/MS running in a MRM mode. In some embodiments, the method comprises selecting a treatment for NSCLC based upon the classification described herein. In some embodiments, the method comprises administering a treatment for NSCLC based upon the classification described herein.

[0662] In some embodiments, the method further comprises collecting a biological sample. In some embodiments, the biological sample comprises a blood sample, a serum sample, a buccal epithelia sample, a nasal epithelia sample, a sputum cytology sample, and a bronchial biopsy sample. In some embodiments, the biological sample comprises a pre-treatment peripheral blood sample. In some embodiments, the biological sample is collected from an individual with early-stage NSCLC. In some embodiments, the biological sample is collected from an individual with late-stage NSCLC. In some embodiments, the biological sample is collected from an individual with stage 0, stage I, stage II, stage III, or stage IV NSCLC. In some embodiments, the biological sample is from a healthy individual (i.e., an individual who does not have NSCLC). In some embodiments, the biological sample is collected from an individual before the onset of disease symptoms and pathological conditions of NSCLC. In some embodiments, the biological sample is collected from an individual after the onset of disease symptoms and pathological conditions of NSCLC. In some embodiments, the biological sample is collected from an individual during disease symptoms and pathological conditions of NSCLC. In some embodiments, the biological sample is collected from an individual before disease progression of NSCLC.

[0663] For example, in certain embodiments, the presence or amount of the at least one peptide and/or glycopeptide structure is detected using liquid chromatography-tandem mass spectrometry (LC-MS/MS) running in a multiple reaction monitoring (MRM) mode, or an ELISA. In one embodiment, the at least one peptide and/or glycopeptide structure is none, or below a detection limit. In one embodiment, the at least one peptide and/or glycopeptide structure that is below a detection limit is enriched and/or concentrated in a biological sample using an antibody specific to the at least one peptide and/or glycopeptide structure. In one embodiment, the at least one peptide and/or glycopeptide structure that is below a detection limit is enriched and/or concentrated in a biological sample using a protein such as a lectin that binds to a carbohydrate portion of at least one glycopeptide structure. In various embodiments, the antibody or protein configured to bind carbohydrate portions (e.g., lectin) is immobilized onto a bead substrate that is optionally a magnetic bead substrate. In one embodiment, the NSCLC is late-stage NSCLC. In one embodiment, the biological sample is a pre-treatment peripheral blood sample. In one embodiment, the one or more peptide structure includes a glycopeptide of a lung-specific protein, and the at least one peptide structure comprises three or more peptide structure identified in Table 35. In one embodiment, the at least one peptide structure comprises three or more amino acid sequence of SEQ ID NOs: 224-257 set forth in Table 35. In one embodiment, the at least one peptide structure comprises three or more amino acid sequence of SEQ ID NOs: 224-257 along with the associated glycan set forth in Table 35. In one embodiment, the at least one peptide structure comprises three or more amino acid sequence of SEQ ID NOs: 258-296 set forth in Table 35. In one embodiment, the at least one peptide structure comprises three or more amino acid sequence of SEQ ID NOs: 258-296 along with the associated glycan set forth in Table 35. In one embodiment, the at least one peptide structure comprises three or more peptide structures identified in Table 40. In one embodiment, the at least one peptide structure comprises three or more amino acid sequence of SEQ ID NOs: 229, 231-234, 236, 239, 241, 244-245, 247-255 set forth in Table 40. In one embodiment, the at least one peptide structure comprises three or more amino acid sequence of SEQ ID NOs: 229, 231-234, 236, 239, 241, 244-245, 247-255 along with the associated glycan set forth in Table 35.

[0664] In some embodiments, the method comprises assessing one or more clinical indicators of NSCLC. In some embodiments, the one or more clinical indicator of NSCLC comprises a new cough, a worsening cough, a persistent cough, a cough that produces blood (e.g., hemoptysis), shortness of breath, a persistent chest infection (e.g., bronchitis, pneumonia), wheezing, chest pain, voice hoarseness, headache, facial swelling, body swelling, upper body pain, weakness of the hand, a droopy eyelid, and blurred vision. In some embodiments, the method includes assessing a patient for unexplained weight loss, tiredness, fatigue, persistent or worsening bone pain, and persistent or worsening joint pain. In some embodiments, the method includes assessing the clinical indicators described herein and any combination thereof in diagnosing a patient having NSCLC. In some embodiments, the method comprises classifying a biological sample with respect to a plurality of states associated with NSCLC based upon one or more peptides structure provided in Table 35 and/or Table 40. In some embodiments, the method comprises classifying a biological sample with respect to a plurality of states associated with NSCLC based upon one or more glycopeptides provided in Table 35 and/or Table 40. In some embodiments, the diagnosis is based upon the presence and/or amount of each of the peptides and/or glycopeptides comprising the amino acid sequence of SEQ ID NOs: 224-296. In some embodiments, the diagnosis is based upon the presence and/or amount of each of the glycopeptides comprising the amino acid sequence of SEQ ID NOs: 224-296. In some embodiments, the method comprises inputting quantification data identified from peptide structure data for a set of peptides and/or glycopeptides into one or more machine-learning model trained to identify a disease indicator. In some embodiments, the method comprises classifying the sample as having NSCLC or not having NSCLC based upon the disease indicator. In some embodiments, the peptide structure data comprises one or more peptide structure provided in Table 35 and/or Table 40. In some embodiments, the presence, absence, and/or amount of one or more peptides and/or glycopeptide is determined by MRM-MS. In some embodiments, the method comprises classifying a biological sample with respect to a plurality of states associated with NSCLC, based upon one or more peptide structure provided in Table 35 or Table 40, and selecting a treatment for NSCLC based upon the classification. In some embodiments, the method comprises classifying a biological sample with respect to a plurality of states associated with NSCLC, based upon one or more peptide structure provided in Table 35 or Table 40, and administering a treatment for NSCLC based upon the classification.

[0665] In some embodiments, the method comprises assessing one or more risk factors selected from the group comprising tobacco smoking, environmental and occupational carcinogen exposure (e.g., tar, soot, arsenic, chromium, and nickel, asbestos, radiation, radon), a family history of lung cancer, poor diet, and limited physical activity. In certain embodiments, the method comprises assessing one or more risk factors of NSCLC, wherein the risk factor of NSCLC is selected from the group consisting of tobacco smoking, a family history of lung cancer, environmental and occupational carcinogen exposure, poor diet, and limited physical activity. In certain embodiments, the individual is determined have a healthy state, in which a healthy state may include the absence of NSCLC. In some embodiments, the method comprises classifying a biological sample with respect to a plurality of states associated with NSCLC based upon one or more peptide structures provided in Table 35 or Table 40. In some embodiments, the diagnosis is based upon the presence and/or amount of each of the peptides and/or glycopeptides comprising the amino acid sequence of SEQ ID NOs: 224-296. In some embodiments, the diagnosis is based upon the presence and/or amount of each of the glycopeptides comprising the amino acid sequence of SEQ ID NOs: 224-296 In some embodiments, the diagnosis is based upon the presence and/or amount of each of the peptides and/or glycopeptides comprising the amino acid sequence of SEQ ID NOs: 224-296 along with the associated glycan set forth in Table 35. In some embodiments, the diagnosis is based upon the presence and/or amount of each of the peptides and/or glycopeptides comprising the amino acid sequence of SEQ ID NOs: 229, 231-234, 236, 239, 241, 244-245, 247-255. In some embodiments, the diagnosis is based upon the presence and/or amount of each of the glycopeptides comprising the amino acid sequence of SEQ ID NOs: 229, 231-234, 236, 239, 241, 244-245, 247-255. In some embodiments, the diagnosis is based upon the presence and/or amount of each of the peptides and/or glycopeptides comprising the amino acid sequence of SEQ ID NOs: 229, 231-234, 236, 239, 241, 244-245, 247-255 along with the associated glycan set forth in Table 35. In some embodiments, the method comprises inputting quantification data identified from peptide structure data for a set of peptides and/or glycopeptides into one or more machine-learning model trained to identify a disease indicator. In some embodiments, the method comprises classifying the sample as having NSCLC or not having NSCLC based upon the disease indicator. In some embodiments, the peptide structure data comprises one or more peptide structure provided in Table 35 and/or Table 40. In some embodiments, the presence, absence, and/or amount of one or more peptides and/or glycopeptide is determined by MRM-MS. In some embodiments, the method comprises classifying a biological sample with respect to a plurality of states associated with NSCLC, based upon one or more peptide structure provided in Table 35 or Table 40, and selecting a treatment for NSCLC based upon the classification. In some embodiments, the method comprises classifying a biological sample with respect to a plurality of states associated with NSCLC, based upon one or more peptide structure provided in Table 35 or Table 40, and administering a treatment for NSCLC based upon the classification.

[0666] FIG. 33 illustrates a flow diagram 3300 of a method for classifying a biological sample obtained from a subject with respect to a plurality of states associated with NSCLC, in accordance with the presently disclosed embodiments. The flow diagram 3300 may be performed utilizing one or more processing devices (e.g., computing platform 302 as discussed above with respect to FIG. 3) that may include hardware (e.g., a general purpose processor, a graphic processing unit (GPU), an application-specific integrated circuit (ASIC), a system-on-chip (SoC), a microcontroller, a field-programmable gate array (FPGA), a central processing unit (CPU), an application processor (AP), a visual processing unit (VPU), a neural processing unit (NPU), a neural decision processor (NDP), a deep learning processor (DLP), a tensor processing unit (TPU), neuromorphic processing unit (NPU), or any other processing device(s) that may be suitable for processing various medical profile data and making one or more decisions based thereon), software (e.g., instructions running/executing on one or more processors), firmware (e.g., microcode), or some combination thereof.

[0667] The flow diagram 3300 may begin at block 3302 with one or more processing devices (e.g., computing platform 302) receiving peptide structure data corresponding to a set of glycoproteins in the biological sample. The flow diagram 3300 may then continue at block 3304 with one or more processing devices (e.g., computing platform 302) inputting quantification data identified from the peptide structure data for a set of peptide structures into a machine-learning model trained to identify a disease indicator based on the quantification data, wherein the set of peptide structures comprises at least one peptide structure identified from a plurality of peptide structures in Table 35 and/or Table 40. The flow diagram 3300 may then continue at block 3306 with one or more processing devices (e.g., computing platform 302) identifying, by the machine-learning model, the disease indicator. The flow diagram 3300 may then conclude at block 3308 with one or more processing devices (e.g., computing platform 302) classifying the biological sample with respect to a plurality of states associated with NSCLC based upon the identified disease indicator.

[0668] FIG. 34 illustrates a flow diagram 3400 of a method for detecting the presence of one of a plurality of states associated with NSCLC in a subject, in accordance with the presently disclosed embodiments. The flow diagram 3400 may be performed utilizing one or more processing devices (e.g., computing platform 302 as discussed above with respect to FIG. 3) that may include hardware (e.g., a general purpose processor, a graphic processing unit (GPU), an application-specific integrated circuit (ASIC), a system-on-chip (SoC), a microcontroller, a field-programmable gate array (FPGA), a central processing unit (CPU), an application processor (AP), a visual processing unit (VPU), a neural processing unit (NPU), a neural decision processor (NDP), a deep learning processor (DLP), a tensor processing unit (TPU), neuromorphic processing unit (NPU), or any other processing device(s) that may be suitable for processing various medical profile data and making one or more decisions based thereon), software (e.g., instructions running/executing on one or more processors), firmware (e.g., microcode), or some combination thereof.

[0669] The flow diagram 3400 may begin at block 3402 with one or more processing devices (e.g., computing platform 302) receiving peptide structure data corresponding to a set of glycoproteins in a biological sample obtained from a subject, wherein the peptide structure data comprises at least one peptide structure from Table 35 and/or Table 40. The flow diagram 3400 may then continue at block 3404 with one or more processing devices (e.g., computing platform 302) inputting quantification data identified from the peptide structure data for a set of peptide structures into a machine-learning model trained to identify a disease indicator based on the quantification data, wherein the set of peptide structures comprises at least one peptide structure identified from a plurality of peptide structures in Table 35 and/or Table 40. The flow diagram 3400 may then conclude at block 3406 with one or more processing devices (e.g., computing platform 302) detecting the presence of a corresponding state of the plurality of states associated with NSCLC in response to a determination that the identified disease indicator falls within a selected range associated with the corresponding state.

[0670] FIG. 35 illustrates a flow diagram 3500 of a method determining one or more of a plurality of treatment regimens for treating NSCLC in a subject, in accordance with the presently disclosed embodiments. The flow diagram 3500 may be performed utilizing one or more processing devices (e.g., computing platform 302 as discussed above with respect to FIG. 3) that may include hardware (e.g., a general purpose processor, a graphic processing unit (GPU), an application-specific integrated circuit (ASIC), a system-on-chip (SoC), a microcontroller, a field-programmable gate array (FPGA), a central processing unit (CPU), an application processor (AP), a visual processing unit (VPU), a neural processing unit (NPU), a neural decision processor (NDP), a deep learning processor (DLP), a tensor processing unit (TPU), neuromorphic processing unit (NPU), or any other processing device(s) that may be suitable for processing various medical profile data and making one or more decisions based thereon), software (e.g., instructions running/executing on one or more processors), firmware (e.g., microcode), or some combination thereof.

[0671] The flow diagram 3500 may begin at block 3502 with one or more processing devices (e.g., computing platform 302) receiving peptide structure data corresponding to a set of glycoproteins in the biological sample. The flow diagram 3500 may then continue at block 3504 with one or more processing devices (e.g., computing platform 302) inputting quantification data identified from the peptide structure data for a set of the peptide structures into a machine-learning model trained to identify a disease indicator for NSCLC based on the quantification data, wherein the set of peptide structure data comprises at least one peptide structure identified from a plurality of peptide structures in Table 35 and/or Table 40. The flow diagram 3500 may then continue at block 3506 with one or more processing devices (e.g., computing platform 302) identifying, by the machine-learning model, the disease indicator. The flow diagram 3500 may then conclude at block 3508 with one or more processing devices (e.g., computing platform 302) determining at least one of a plurality of treatment regimens for treating NSCLC based upon the identified disease indicator.

### VI.C. General Methodology System for Diagnosis of Ovarian Cancer based on Tables 41 and 42

[0672] FIG. 47 is a flowchart of a process for diagnosing a subject with respect to an ovarian cancer disease state in accordance with one or more embodiments. Process 500 may be implemented using, for example, at least a portion of workflow 100 as described in FIGS. 1, 2A, and 2B and/or analysis system 300 as described in FIG. 3. Process 500 may be used to generate a final output that includes at least a diagnosis output for the subject.

[0673] Step 502 includes receiving peptide structure data corresponding to a biological sample obtained from the subject. The peptide structure data may be, for example, one example of an implementation of peptide structure data 310 in FIG. 3. The peptide structure data may include quantification data for each peptide structure of a plurality of peptide structures. The quantification data may include, for example, one or more quantification metrics for each peptide structure of the plurality of peptide structures. A quantification metric for a peptide structure may be, for example, but is not limited to, a relative quantity, an adjusted quantity, a normalized quantity, a relative concentration, an adjusted concentration, or a normalized concentration. In this manner, the quantification data for a given peptide structure provides an indication of the abundance of the peptide structure in the biological sample. In some cases, at least one peptide structure includes a glycopeptide structure having a peptide sequence and a glycan structure linked to the peptide sequence at a linking site of the peptide sequence, as identified in Table 41 or Table 42, with the peptide sequence being one of SEQ ID NOS: 307-316 in Table 41 or one of SEQ ID NOS: 310, 311, and 428-443 in Table 42, the SEQ ID NOS being defined in Table 45 below.

[0674] Step 504 includes analyzing the peptide structure data using a supervised machine learning model to generate a disease indicator that indicates whether the biological sample evidences an ovarian cancer disease state based on at least three peptide structures selected from a first group of peptide structures identified in Table 41 (below) or a second group of peptide structures identified in Table 42 (below). In step 504, the first and second groups of peptide structures are associated with the ovarian cancer disease state. The first group of peptide structures is listed in Table 41 with respect to relative significance to the disease indicator. The second group of peptide structures is listed in Table 42 with respect to relative significance to the disease indicator.

[0675] The first group of peptide structures in Table 41 includes peptide structures that have been determined relevant to distinguishing at least between ovarian cancer (e.g., EOC) and a healthy state. For example, the first group of peptide structures may be used to predict the probability of EOC for use in clinically screening patients. In one or more embodiments, the first group of peptide structures in Table 41 may also be peptide structures that have been determined relevant to distinguishing between ovarian cancer (e.g., EOC) and a benign tumor state (e.g., a benign pelvic tumor). For example, the first group of peptide structures may be used to clinically triage patients that have been identified as having pelvic tumors to determine the probability that such a tumor evidences EOC.

[0676] The second group of peptide structures in Table 42 includes peptide structures that have been determined relevant to distinguishing at least between ovarian cancer (e.g., EOC) and the benign tumor state (e.g., a benign pelvic tumor). For example, the second group of peptide structures may be used to clinically triage patients that have been identified as having pelvic tumors to determine the probability that such a tumor evidences EOC. In this manner, the second group of peptide structures may predict malignancy of an identified pelvic tumor.

[0677] In one or more embodiments, the at least 3 peptide structures includes at least 3, at least 4, at least 5, at least 6, at least 7, at least 8, at least 9, or all 10 of the peptide structures PS-165 to PS-174 in Table 41. In some embodiments, the at least 3 peptide structures include at least 3, at least 4, at least 5, at least 6, at least 7, at least 8, at least 9, at least 10, at least 11, at least 12, at least 13, at least 14, at least 15, at least 16, at least 17, at least 18, at least 19, at least 20, at least 21, at least 22, at least 23, at least 23, at least 24, or all 25 of the peptide structures PS-169 and PS-175 through PS-198 in Table 41. In some embodiments, the at least 3 peptide structures includes at least PS-169, which is present in both Table 41 and Table 42.

[0678] In one or more embodiments, step 504 may be implemented using a binary classification model (e.g., a regression model). In some examples, the regression model may be, for example, penalized multivariable regression model. In various embodiments, the disease indicator may be computed using a weight coefficient associated with each peptide structure of the at least 3 peptide structures, the weight coefficient of a corresponding peptide structure of the at least 3 peptide structures may indicate the relative significance of the corresponding peptide structure to the disease indicator.

[0679] In some embodiments, step 504 may include computing a peptide structure profile for the biological sample that identifies a weighted value for each peptide structure of the at least 3 peptide structures. The weighted value for a peptide structure of the at least 3 peptide structures may be a product of a quantification metric for the peptide structure identified from the peptide structure data and a weight coefficient for the peptide structure. The disease indicator may be computed using the peptide structure profile. For example, the disease indicator may be a logit equal to the sum of the weighted values for the peptide structures plus an intercept value. The intercept value may be determined during the training of the model.

[0680] The peptide structure profile for a given peptide structure may include a corresponding feature-relative abundance, concentration, site occupancy—for that peptide structure. The relative abundance may be a normalized relative abundance; the concentration may be normalized concentration. In some cases, two peptide structure profiles may be computed for the same peptide structure, each profile corresponding to a different feature. For example, a first peptide structure profile may include a relative abundance for a corresponding peptide structure and a second peptide structure profile may include a concentration for the same corresponding peptide structure.

[0681] In various embodiments, the disease indicator comprises a probability that the biological sample is positive for the ovarian cancer disease state and the supervised machine learning model is configured to generate an output that identifies the biological sample as either evidencing (“positive for”) the ovarian cancer disease state when the disease indicator is greater than a selected threshold or not evidencing (“negative for”) the ovarian cancer disease state when the disease indicator is not greater than the selected threshold. The selected threshold may be, for example, 0.30, 0.35, 0.40, 0.45, 0.50, 0.55, 0.60, or some other threshold between 0.30 and 0.65. In one or more embodiments, the selected threshold is 0.5.

[0682] Step 506 includes generating a final output based on the disease indicator. The final output may include a diagnosis output, such as, for example, diagnosis output 324 in FIG. 3. The diagnosis output may include the disease indicator, or a diagnosis made based on the disease indicator. The diagnosis may be, for example, “positive” for the ovarian cancer disease state if the biological sample evidences the ovarian cancer disease state based on the disease indicator. The diagnosis may be, for example, “negative” if the biological sample does not evidence the ovarian cancer disease state based on the disease indicator. A negative diagnosis may mean that the biological sample has a non-ovarian cancer state. The negative diagnosis for the ovarian cancer disease state can include at least one of a healthy state, a benign tumor state, or some other non-malignant state.

[0683] Generating the diagnosis output in step 506 may include determining that the score falls above (or at or above) a selected threshold and generating a positive diagnosis for the ovarian cancer disease state. Alternatively, step 506 can include determining that the score falls below (or at or below) a selected threshold and generating a negative diagnosis for the ovarian cancer disease state. In some scoring systems, the score can include a probability score and the selected threshold can be 0.5. In other scoring systems, the selected threshold can fall within a range between 0.30 and 0.65.

[0684] In one or more embodiments, the final output in step 506 may include a treatment output if the diagnosis output indicates a positive diagnosis for the ovarian cancer disease state. The treatment output may include, for example, at least one of an identification of a treatment for the subject, a treatment plan for administering the treatment, or both. Treatment for ovarian cancer may include, for example, but is not limited to, at least one of surgery, radiation therapy, a targeted drug therapy (e.g., one or more targeted therapeutic agents), chemotherapy (e.g., one or more chemotherapeutic agents), immunotherapy (e.g., one or more immunotherapeutic agents), hormone therapy, neoadjuvant therapy, or some other form of treatment. The treatment plan may include, for example, but is not limited to, a timeline or schedule for administering the treatment, dosing information, other treatment-related information, or a combination thereof.

[0685] Table 41 below lists a first group of peptide structures associated with malignant pelvic tumors (e.g., ovarian cancer such as EOC). One or more features (e.g., relative abundance, concentration, site occupancy) of these peptide structures may be used in the supervised machine learning model described above to generate a disease indicator that predicts the probability of malignancy (e.g., in the context of screening for malignant pelvic tumors). The first group of peptide structures is listed in Table 41 in order with respect to relative significance to the disease indicator. In training, testing, and predictive use of this model, the quantification metrics for peptide structure PS-173, peptide structure PS-174, or a combination of the two may form one input. Table 41 also identifies check markers CK-1 and CK-2, which may also be used by the model.

TABLE 41
1^{st} Group of Peptide Structures Associated with
Ovarian Cancer
(may be used to distinguish between malignant
pelvic tumor (e.g., EOC) and healthy)

| | | | | | Linking | Linking | Glycan |
|---|---|---|---|---|---|---|---|
| | Peptide | (Protein) | (Peptide) | Mono- | Site | Site | Struc- |
| PS- | Structure | SEQ | SEQ | isotopic | Pos. in | Pos. in | ture |
| ID | (PS) | ID | ID | mass | Protein | Peptide | GL |
| NO. | NAME | NO. | NO. | (Da) | Sequence | Sequence | NO. |
| 165 | ZA2G_ | 297 | 307 | 3342.26 | 128 | 8 | 5402 |
| | 128_ | | | | | | |
| | 5402 | | | | | | |
| 166 | IC1_ | 298 | 308 | 4961.09 | 253 | 4 | 6503 |
| | 253_ | | | | | | |
| | 6503 | | | | | | |
| 167 | CFAI_ | 299 | 309 | 3025.18 | 494 | 4 | 5402 |
| | 494_ | | | | | | |
| | 5402 | | | | | | |
| 168 | CERU_ | 300 | 310 | 4898.89 | 138 | 10 | 6513 |
| | 138_ | | | | | | |
| | 6513 | | | | | | |
| 169 | IGG1_ | 301 | 311 | 2633.04 | 180 | 5 | 3410 |
| | 297_ | | | | | | |
| | 3410 | | | | | | |
| 170 | HEMO_ | 302 | 312 | 4731.84 | 64 | 15 | 5402 |
| | 64_ | | | | | | |
| | 5402 | | | | | | |
| 171 | APOB_ | 303 | 313 | 5754.34 | 983 | 16 | 5402 |
| | 983_ | | | | | | |
| | 5402 | | | | | | |
| 172 | HPT_ | 304 | 314 | 6888.63 | 207 | 5, | 121005 |
| | 207_ | | | | | 9 | |
| | 121005 | | | | | | |
| CK- | FINC_ | N/A | N/A | N/A | N/A | N/A | N/A |
| 1 | SYTITG | | | | | | |
| | LQPGTD | | | | | | |
| | YK | | | | | | |
| 173 | IGG3_ | 305 | 315 | 2470.99 | 227 | 5 | 3400 |
| | 297_ | | | | | | |
| | 3400 | | | | | | |
| 174 | IGG34_ | 306 | 316 | 2470.99 | 227 | 5 | 3400 |
| | 297_ | | | | | | |
| | 3400 | | | | | | |
| CK- | APOM_ | N/A | N/A | N/A | N/A | N/A | N/A |
| 2 | 135_ | | | | | | |
| | 8500 | | | | | | |
| | CHK | | | | | | |

[0686] Table 42 below lists a second group of peptide structures associated with malignant pelvic tumors (e.g., ovarian cancer such as EOC). One or more features (e.g., relative abundance, concentration, site occupancy) of these peptide structures may be used in the supervised machine learning model described above to generate a disease indicator that predicts the probability of malignancy (e.g., in the context of triaging to distinguish between malignant and benign pelvic tumors). The second group of peptide structures is listed in Table 42 in order with respect to relative significance to the disease indicator. Table 42 also identifies check markers CK-3 and CK-4, which may also be used by the model.

TABLE 42
2^{nd} Group of Peptide Structures Associated with Ovarian Cancer
(may be used to distinguish between malignant v. benign pelvic tumors)

| | Peptide | | | Mono- | Linking | Linking | |
|---|---|---|---|---|---|---|---|
| | Structure | (Protein) | (Peptide) | isotopic | Site Pos. | Site Pos. | Glycan |
| PS-ID | (PS) | SEQ ID | SEQ ID | mass | in Protein | in Peptide | Structure |
| NO. | NAME | NO. | NO. | (Da) | Sequence | Sequence | GL NO. |
| CK-3 | APOD_98_9800_CHECK | N/A | N/A | N/A | N/A | N/A | N/A |
| 175 | CO2_621_5200 | 417 | 428 | 2670.19 | 621 | 11 | 5200 |
| 169 | IGG1_297_3410 | 301 | 311 | 2633.04 | 180 | 5 | 3410 |
| 176 | AGP1_93_7612 | 418 | 429 | 4995.98 | 93 | 7 | 7612 |
| 177 | AACT_271_7602 | 419 | 430 | 4686.91 | 271 | 4 | 7602 |
| 178 | A2MG_1424_5402 | 420 | 431 | 4366.95 | 1424 | 3 | 5402 |
| 179 | AACT_271_6513 | 419 | 430 | 4758.93 | 271 | 4 | 6513 |
| 180 | CERU_397_5402 | 300 | 432 | 4330.76 | 397 | 2 | 5402 |
| 181 | APOB_3411_5301 | 303 | 433 | 3316.40 | 3411 | 7 | 5301 |
| 182 | AACT_106_6513 | 419 | 434 | 5406.24 | 106 | 2 | 6513 |
| 183 | CERU_138_5402 | 300 | 310 | 4096.61 | 138 | 10 | 5402 |
| 184 | A1AT_107_6513 | 421 | 435 | 6697.87 | 107 | 14 | 6513 |
| 185 | AGP1_93_7602 | 418 | 429 | 4849.93 | 93 | 7 | 7602 |
| 186 | VTNC_242_6502 | 422 | 436 | 5341.22 | 242 | 1 | 6502 |
| 187 | IGG2_297_3510 | 423 | 437 | 2804.13 | 176 | 5 | 3510 |
| 188 | CFAH_882_5411 | 424 | 438 | 4079.71 | 882 | 15 | 5411 |
| CK-4 | APOM_135_8500_CHECK | N/A | N/A | N/A | N/A | N/A | N/A |
| 189 | AGP1_103_8704 | 418 | 439 | 4657.74 | 103 | 2 | 8704 |
| 190 | IGG1_297_4300 | 301 | 311 | 2445.95 | 180 | 5 | 4300 |
| 191 | APOH_253_5401 | 425 | 440 | 3163.24 | 253 | 3 | 5401 |
| 192 | APOD_98_5411 | 426 | 441 | 4312.85 | 98 | 16 | 5411 |
| 193 | TRFE_630_5411 | 427 | 442 | 4573.85 | 630 | 9 | 5411 |
| 194 | CERU_138_6502 | 300 | 310 | 4461.74 | 138 | 10 | 6502 |
| 195 | A2MG_1424_5411 | 420 | 431 | 4221.91 | 1424 | 3 | 5411 |
| 196 | A2MG_55_5411 | 420 | 443 | 4455.96 | 55 | 9 | 5411 |
| 197 | TRFE_630_5412 | 427 | 442 | 4864.95 | 630 | 9 | 5412 |
| 198 | IGG2_297_4511 | 423 | 437 | 3257.28 | 176 | 5 | 4511 |

### VI.D. General Methodology System for Diagnosis of Ovarian Cancer based on Table 43A

[0687] FIG. 48A is a flowchart of a process for diagnosing a subject with respect to an ovarian cancer disease state in accordance with one or more embodiments. Process 600 may be implemented using, for example, at least a portion of workflow 100 as described in FIGS. 1, 2A, and 2B and/or analysis system 300 as described in FIG. 3. Process 600 may be used to generate a final output that includes at least a diagnosis output for the subject.

[0688] Step 602 includes receiving peptide structure data corresponding to a biological sample obtained from the subject. The peptide structure data may be, for example, one example of an implementation of peptide structure data 310 in FIG. 3. The peptide structure data may include quantification data for each peptide structure of a plurality of peptide structures. The quantification data may include, for example, one or more quantification metrics for each peptide structure of the plurality of peptide structures. A quantification metric for a peptide structure may be, for example, but is not limited to, a relative quantity, an adjusted quantity, a normalized quantity, a relative concentration, an adjusted concentration, or a normalized concentration. In this manner, the quantification data for a given peptide structure provides an indication of the abundance of the peptide structure in the biological sample. In some cases, at least one peptide structure includes a glycopeptide structure having a peptide sequence and a glycan structure linked to the peptide sequence at a linking site of the peptide sequence, as identified in Table 43A, with the peptide sequence being one of SEQ ID NOS: 307, 310, 311, 428-431, 434, 435, 437, 439, 441, 442, 443, 450-462 in Table 43A, the SEQ ID NOS being defined in Table 45 below.

[0689] Step 604 includes analyzing the peptide structure data using a supervised machine learning model to generate a disease indicator that predicts whether the biological sample evidences a malignant pelvic tumor or benign pelvic tumor based on at least three peptide structures selected from a group of peptide structures identified in Table 43A. The group of peptide structures is listed in Table 43A with respect to relative significance to the disease indicator, which may be a probability score. In step 604, the group of peptide structures is associated with the malignancy (e.g., EOC). For example, the group of peptide structures in Table 43A includes peptide structures that have been determined relevant to distinguishing between a malignant and benign nature of a pelvic tumor.

[0690] In one or more embodiments, the at least 3 peptide structures includes at least 3, at least 4, at least 5, at least 6, at least 7, at least 8, at least 9, at least 10, at least 11, at least 12, at least 13, at least 14, at least 15, at least 16, at least 17, at least 18, at least 19, at least 20, at least 21, at least 22, at least 23, at least 23, at least 24, at least 25, at least 26, at least 27, at least 28, at least 29, at least 30, at least 31, at least 32, at least 33, at least 34, at least 35, at least 36, at least 37, or all 38 of the peptide structures PS-165, PS-169, PS-175, PS-179, PS-184, PS-189, PS-192, PS-193, PS-194, PS-195, PS-196, and PS-199 to PS-225 identified in Table 43A.

[0691] In one or more embodiments, step 604 may be implemented using a binary classification model (e.g., a regression model). In some examples, the regression model may be, for example, penalized multivariable regression model. In various embodiments, the disease indicator may be computed using a weight coefficient associated with each peptide structure of the at least 3 peptide structures, the weight coefficient of a corresponding peptide structure of the at least 3 peptide structures may indicate the relative significance of the corresponding peptide structure to the disease indicator.

[0692] In some embodiments, step 604 may include computing a peptide structure profile for the biological sample that identifies a weighted value for each peptide structure of the at least 3 peptide structures. The weighted value for a peptide structure of the at least 3 peptide structures may be a product of a quantification metric for the peptide structure identified from the peptide structure data and a weight coefficient for the peptide structure. The disease indicator may be computed using the peptide structure profile. For example, the disease indicator may be a logit equal to the sum of the weighted values for the peptide structures plus an intercept value. The intercept value may be determined during the training of the model.

[0693] In various embodiments, the disease indicator comprises a probability that the biological sample is evidences malignancy (e.g., EOC) and the supervised machine learning model is configured to generate an output that identifies the biological sample as either evidencing (“positive for”) malignancy when the disease indicator is greater than a selected threshold or not evidencing (“negative for”) malignancy when the disease indicator is not greater than the selected threshold. The selected threshold may be, for example, 0.30, 0.35, 0.40, 0.45, 0.50, 0.55, 0.60, or some other threshold between 0.30 and 0.65. In one or more embodiments, the selected threshold is 0.5.

[0694] Step 606 includes generating a final output based on the disease indicator. The final output may include a diagnosis output, such as, for example, diagnosis output 324 in FIG. 3. The diagnosis output may include the disease indicator, or a diagnosis made based on the disease indicator. The diagnosis may be, for example, “positive” for an ovarian cancer disease state (e.g., EOC) if the biological sample evidences malignancy based on the disease indicator. The diagnosis may be, for example, “negative” if the biological sample does not evidence malignancy based on the disease indicator. A negative diagnosis may mean that the biological sample evidences a benign status (or a non-ovarian cancer state).

[0695] Generating the diagnosis output in step 606 may include determining that the score falls above (or at or above) a selected threshold and generating a positive diagnosis for the ovarian cancer disease state. Alternatively, step 606 can include determining that the score falls below (or at or below) a selected threshold and generating a negative diagnosis for the ovarian cancer disease state. In some scoring systems, the score can include a probability score and the selected threshold can be 0.5. In other scoring systems, the selected threshold can fall within a range between 0.30 and 0.65.

[0696] In one or more embodiments, the final output in step 606 may include a treatment output if the disease indicator predicts malignancy and/or the diagnosis output indicates a positive diagnosis for the ovarian cancer disease state. The treatment output may include, for example, at least one of an identification of a treatment for the subject, a treatment plan for administering the treatment, or both. Treatment for ovarian cancer may include, for example, but is not limited to, at least one of surgery, radiation therapy, a targeted drug therapy (e.g., one or more targeted therapeutic agents), chemotherapy (e.g., one or more chemotherapeutic agents), immunotherapy (e.g., one or more immunotherapeutic agents), hormone therapy, neoadjuvant therapy, or some other form of treatment. The treatment plan may include, for example, but is not limited to, a timeline or schedule for administering the treatment, dosing information, other treatment-related information, or a combination thereof.

TABLE 43A
3^{rd} Group of Peptide Structures Associated with Ovarian Cancer
(may be used to distinguish between malignant and benign pelvic tumors)

| | | | | Linking | |
|---|---|---|---|---|---|
| | | (Protein) | (Peptide) | Site Pos. | Glycan |
| PS-ID | | SEQ ID | SEQ ID | in Protein | Structure |
| NO. | Peptide Structure (PS) NAME | NO. | NO. | Sequence | GL NO. |
| 199 | VTNC_169_5401 | 422 | 450 | 169 | 5401 |
| 200 | FETUA_176_6513 | 444 | 451 | 176 | 6513 |
| 201 | AGP1_93_7614 | 418 | 429 | 93 | 7614 |
| 202 | QUANTPEP.A2GL_DLLLPQPDLR | 445 | 452 | N/A | N/A |
| 203 | HPT_184_5402 | 304 | 453 | 184 | 5402 |
| 204 | TRFE_432_6503 | 427 | 454 | 432 | 6503 |
| 205 | TRFE_630_6513 | 427 | 442 | 630 | 6513 |
| 206 | HEMO_453_5402 | 302 | 455 | 453 | 5402 |
| 207 | QUANTPEP.TTR_TSESGELHGLT | 446 | 456 | N/A | N/A |
| | TEEEFVEGIYK | | | | |
| 169 | IGG1_297_3410 | 301 | 311 | 297 | 3410 |
| 109 | TRFE_630_5400 | 427 | 442 | 630 | 5400 |
| 208 | AGP1_103_9804 | 418 | 439 | 103 | 9804 |
| 209 | TRFE_432_6501 | 427 | 454 | 432 | 6501 |
| 210 | HPT_241_5402 | 304 | 457 | 241 | 5402 |
| 211 | IGG1_297_5510 | 301 | 311 | 297 | 5510 |
| 212 | QUANTPEP.AFAM_SDVGFLPPFP | 447 | 458 | N/A | N/A |
| | TLDPEEK | | | | |
| 196 | A2MG_55_5411 | 420 | 443 | 55 | 5411 |
| 214 | IGG2_297_5510 | 423 | 437 | 297 | 5510 |
| 215 | AGP1_103_7603 | 418 | 439 | 103 | 7603 |
| 216 | IGG2_297_5400 | 423 | 437 | 297 | 5400 |
| 165 | ZA2G_128_5402 | 297 | 307 | 128 | 5402 |
| 217 | TRFE_630_6502 | 427 | 442 | 630 | 6502 |
| 218 | TRFE_432_6502 | 427 | 454 | 432 | 6502 |
| 219 | IGG2_297_4510 | 423 | 437 | 297 | 4510 |
| 220 | AACT_106_7614 | 419 | 434 | 106 | 7614 |
| 221 | PEP-APOA1_VSFLSALEEYTK | 448 | 459 | N/A | N/A |
| 175 | CO2_621_5200 | 417 | 428 | 621 | 5200 |
| 179 | AACT_271_6513 | 419 | 430 | 271 | 6513 |
| 222 | FETUA_176_5401 | 444 | 451 | 176 | 5401 |
| 223 | FETUA_346_1102 | 444 | 460 | 346 | 1102 |
| 224 | PEP-APOA1_THLAPYSDELR | 448 | 461 | N/A | N/A |
| 193 | TRFE_630_5411 | 427 | 442 | 630 | 5411 |
| 189 | AGP1_103_8704 | 418 | 439 | 103 | 8704 |
| 194 | CERU_138_6502 | 300 | 310 | 138 | 6502 |
| 184 | A1AT_107_6513 | 421 | 435 | 107 | 6513 |
| 195 | A2MG_1424_5411 | 420 | 431 | 1424 | 5411 |
| 192 | APOD_98_5411 | 426 | 441 | 98 | 5411 |
| 225 | C4BPA_221_5402 | 449 | 462 | 221 | 5402 |

### VI.E. General Methodology System for Diagnosis of Ovarian Cancer based on Table 43B

[0697] FIG. 48B is a flowchart of a process for diagnosing a subject with respect to an ovarian cancer disease state in accordance with one or more embodiments. Process 600B may be implemented using, for example, at least a portion of workflow 100 as described in FIGS. 1, 2A, and 2B and/or analysis system 300 as described in FIG. 3. Process 600B may be used to generate a final output that includes at least a diagnosis output for the subject such as, for example early stage EOC or late stage EOC.

[0698] Step 602B includes receiving peptide structure data corresponding to a biological sample obtained from the subject. The peptide structure data may be, for example, one example of an implementation of peptide structure data 310 in FIG. 3. The peptide structure data may include quantification data for each peptide structure of a plurality of peptide structures. The quantification data may include, for example, one or more quantification metrics for each peptide structure of the plurality of peptide structures. A quantification metric for a peptide structure may be, for example, but is not limited to, a relative quantity, an adjusted quantity, a normalized quantity, a relative concentration, an adjusted concentration, or a normalized concentration. In this manner, the quantification data for a given peptide structure provides an indication of the abundance of the peptide structure in the biological sample. In some cases, at least one peptide structure includes a glycopeptide structure having a peptide sequence and a glycan structure linked to the peptide sequence at a linking site of the peptide sequence, as identified in Table 43B, with the peptide sequence being one of SEQ ID NOS: 310, 314, 429, 430, 434, 436, 439, 442, 451, 453, 457, 465, 466, 467, 468, 469, 470, 471, 472, 473, and 474 in Table 43B, the SEQ ID NOS being defined in Table 45 below. It should be noted that the glycopeptides of Table 43B were part of a glycoprotein that are further described in Table 46 and that the glycan portion of the glycopeptides is described in Table 47.

[0699] Step 604B includes analyzing the peptide structure data using a supervised machine learning model to generate a disease indicator that predicts whether the biological sample evidences a early stage or late stage EOC on at least one peptide structures selected from a group of peptide structures identified in Table 43B. In step 604B, the group of peptide structures is associated with the early stage or late stage EOC. For example, the group of peptide structures in Table 43B includes peptide structures that have been determined relevant to distinguishing between early stage (stages 1 and 2) or late stage (stages 3 and 4) EOC.

[0700] In one or more embodiments, the at least 1 peptide structure includes at least 1, at least 2, at least 3, at least 4, at least 5, at least 6, at least 7, at least 8, at least 9, at least 10, at least 11, at least 12, at least 13, at least 14, at least 15, at least 16, at least 17, at least 18, at least 19, at least 20, at least 21, at least 22, at least 23, at least 23, at least 24, at least 25, at least 26, at least 27, at least 28, at least 29, at least 30, at least 31, at least 32, at least 33, at least 34, at least 35, or all 36 of the peptide structures PS-168, PS-172, PS-182, PS-200, PS-201, PS-205, PS-220, PS-226 to PS-254 identified in Table 43B.

[0701] In one or more embodiments, step 604B may be implemented using a binary classification model (e.g., a regression model). In some examples, the regression model may be, for example, penalized multivariable regression model. In various embodiments, the disease indicator may be computed using a weight coefficient associated with each peptide structure of the at least 1 peptide structure, the weight coefficient of a corresponding peptide structure of the at least 1 peptide structures may indicate the relative significance of the corresponding peptide structure to the disease indicator.

[0702] In some embodiments, step 604B may include computing a peptide structure profile for the biological sample that identifies a weighted value for each peptide structure of the at least 1 peptide structure. The weighted value for a peptide structure of the at least 1 peptide structure may be a product of a quantification metric for the peptide structure identified from the peptide structure data and a weight coefficient for the peptide structure. The disease indicator may be computed using the peptide structure profile. For example, the disease indicator may be a logit equal to the sum of the weighted values for the peptide structures plus an intercept value. The intercept value may be determined during the training of the model.

[0703] In various embodiments, the disease indicator comprises a probability that the biological sample is evidences malignancy (e.g., EOC) and the supervised machine learning model is configured to generate an output that identifies the biological sample as either evidencing (“positive for”) malignancy when the disease indicator is greater than a selected threshold or not evidencing (“negative for”) malignancy when the disease indicator is not greater than the selected threshold. The selected threshold may be, for example, 0.30, 0.35, 0.40, 0.45, 0.50, 0.55, 0.60, or some other threshold between 0.30 and 0.65. In one or more embodiments, the selected threshold is 0.5.

[0704] Step 606B includes generating a final output based on the disease indicator. The final output may include a diagnosis output, such as, for example, diagnosis output 324 in FIG. 3. The diagnosis output may include the disease indicator, or a diagnosis made based on the disease indicator. The diagnosis may be, for example, early stage or late stage based on the disease indicator. An early stage diagnosis may mean that the biological sample evidences a stage 1 or 2 EOC. A late stage diagnosis may mean that the biological sample evidences a stage 3 or 4 EOC.

[0705] Generating the diagnosis output in step 606B may include determining that the score falls above (or at or above) a selected threshold and generating a positive diagnosis for the late stage ovarian cancer disease state. Alternatively, step 606B can include determining that the score falls below (or at or below) a selected threshold and generating a negative diagnosis for the late stage ovarian cancer disease state. In some scoring systems, the score can include a probability score and the selected threshold can be 0.5. In other scoring systems, the selected threshold can fall within a range between 0.30 and 0.65.

[0706] In one or more embodiments, the final output in step 606B may include a treatment output if the disease indicator predicts malignancy and/or the diagnosis output indicates a positive diagnosis for the ovarian cancer disease state. The treatment output may include, for example, at least one of an identification of a treatment for the subject, a treatment plan for administering the treatment, or both. Treatment for ovarian cancer may include, for example, but is not limited to, at least one of surgery, radiation therapy, a targeted drug therapy (e.g., one or more targeted therapeutic agents), chemotherapy (e.g., one or more chemotherapeutic agents), immunotherapy (e.g., one or more immunotherapeutic agents), hormone therapy, neoadjuvant therapy, or some other form of treatment. The treatment plan may include, for example, but is not limited to, a timeline or schedule for administering the treatment, dosing information, other treatment-related information, or a combination thereof.

TABLE 43B
Group of Peptide Structures Associated with Ovarian Cancer
(may be used to distinguish between early stage v. late stage ovarian cancer)

| | Peptide | | | Mono- | Linking | Linking | |
|---|---|---|---|---|---|---|---|
| | Structure | (Protein) | (Peptide) | isotopic | Site Pos. | Site Pos. | Glycan |
| PS-ID | (PS) | SEQ ID | SEQ ID | mass | in Protein | in Peptide | Structure |
| NO. | NAME | NO. | NO. | (Da) | Sequence | Sequence | GL NO. |
| 226 | AACT_106_6503 | 419 | 434 | 5260.186906 | 106 | 2 | 6503 |
| 182 | AACT_106_6513 | 419 | 434 | 5406.244812 | 106 | 2 | 6513 |
| 227 | AACT_106_7604 | 419 | 434 | 5916.414504 | 106 | 2 | 7604 |
| 219 | AACT_106_7614 | 419 | 434 | 6062.47241 | 106 | 2 | 7614 |
| 228 | AACT_271_6502 | 419 | 430 | 4321.777556 | 271 | 4 | 6502 |
| 229 | AGP1_103_6503 | 418 | 439 | 3636.3824 | 103 | 2 | 6503 |
| 230 | AGP1_103_6513 | 418 | 439 | 3782.440306 | 103 | 2 | 6513 |
| 231 | AGP1_103_7602 | 418 | 439 | 3710.419178 | 103 | 2 | 7602 |
| 232 | AGP1_103_7614 | 418 | 439 | 4438.667904 | 103 | 2 | 7614 |
| 233 | AGP1_93_6503 | 418 | 429 | 4775.889354 | 93 | 7 | 6503 |
| 234 | AGP1_93_6513 | 418 | 429 | 4921.94726 | 93 | 7 | 6513 |
| 235 | AGP1_93_7613 | 418 | 429 | 5287.079448 | 93 | 7 | 7613 |
| 201 | AGP1_93_7614 | 418 | 429 | 5578.174858 | 93 | 7 | 7614 |
| 236 | AGP12_56_6503 | 418, 463 | 465 | 3656.339868 | 56 | 5 | 6503 |
| 237 | AGP12_56_6513 | 418, 463 | 465 | 3802.397774 | 56 | 5 | 6513 |
| 238 | AGP12_72_6503 | 418, 463 | 466 | 4779.946464 | 72 | 15 | 6503 |
| 239 | AGP12_72_7603 | 418, 463 | 466 | 5145.078652 | 72 | 15 | 7603 |
| 240 | AGP2_103_6513 | 463 | 467 | 3768.424656 | 103 | 2 | 6513 |
| 241 | APOH_162_6503 | 425 | 468 | 4328.746982 | 162 | 8 | 6503 |
| 168 | CERU_138_6513 | 300 | 310 | 4898.89152 | 138 | 10 | 6513 |
| 242 | CERU_397_6513 | 300 | 469 | 5133.049472 | 397 | 2 | 6513 |
| 243 | CERU_762_6513 | 300 | 470 | 5028.0545 | 762 | 9 | 6513 |
| 244 | FETUA_156_6503 | 444 | 471 | 4631.839236 | 156 | 12 | 6503 |
| 200 | FETUA_176_6513 | 444 | 451 | 5371.203674 | 176 | 11 | 6513 |
| 245 | HEMO_187_6503 | 302 | 472 | 4264.661538 | 187 | 7 | 6503 |
| 246 | HEMO_187_6513 | 302 | 472 | 4410.719444 | 187 | 7 | 6513 |
| 247 | HPT_184_6513 | 304 | 453 | 5685.442854 | 184 | 6 | 6513 |
| 248 | HPT_207_11904 | 304 | 314 | 6232.403228 | 207 | 5, 9 | 5402 or 6502 |
| 249 | HPT_207_11915 | 304 | 314 | 6669.556544 | 207, 211 | 5, 9 | 5402 or 6513 |
| 172 | HPT_207_121005 | 304 | 314 | 6888.630826 | 207 | 5, 9 | 6502 or 6503 |
| 250 | HPT_241_6513 | 304 | 457 | 4801.061826 | 241 | 6 | 6513 |
| 251 | HPT_241_7613 | 304 | 457 | 5166.194014 | 241 | 6 | 7613 |
| 252 | KNG1_205_6513 | 464 | 473 | 4419.754828 | 205 | 9 | 6513 |
| 253 | KNG1_294_6503 | 464 | 474 | 4291.682988 | 294 | 6 | 6503 |
| 205 | TRFE_630_6513 | 427 | 442 | 5521.174696 | 630 | 9 | 6513 |
| 254 | VTNC_242_6503 | 422 | 436 | 5632.31501 | 242 | 1 | 6503 |

[0707] It is worthwhile to note that with a few exceptions (PS-226 and PS-231), the majority of glycopeptides were tri- and tetra-antennary glycans with or without a fucose and were found to be associated with either early stage or late stage EOC. Fold changes (FCs) for several glycopeptides in stage IV (referred to as metastatic ovarian cancer) vs benign/stage I/II/I11 (referred to as non-metastatic ovarian cancer) were calculated by normalizing to normal blood samples, as illustrated in FIG. 60. The FCs were observed to stratify between fucosylated and non-fucosylated (plots include median and 95% confidence interval). FCs that were above the 1 corresponded to markers that correlate with metastatic ovarian cancer and those below 1 corresponded to markers that correlate with non-metastatic ovarian cancer. The Wilcoxon matched-pairs signed rank test was used to compare the two groups and a p value found to be <0.0001 showing a statistical difference between non-fucosylated and fucosylated. FIGS. 61A and 61B illustrate that a same set of markers in doublets/triplets analysis for fucosylation revealed a strong association with either metastatic ovarian cancer or non-metastatic ovarian cancer. Doublet analysis refers to monitoring the fold change of a non-fucosylated and fucosylated glycopeptide that was tri or tetra-antennary for sialic acid and had the same peptide sequence and glycan linking site. Triplet analysis refers to monitoring the fold change of a non-fucosylated, fucosylated, and di-fucosylated glycopeptide that was tri or tetraantennary for sialic acid and had the same peptide sequence and glycan linking site. FIGS. 57A-57E shows that the fucosylated biomarkers (have a number 1 in the 2^{nd} to last number in the Peptide structure (PS) Name) show a relatively upward trend from stage 1/2 to stage 3/4. In contrast, FIGS. 57A-57E shows that the non-fucosylated biomarkers (have a number 0 in the 2^{nd} to last number in the Peptide structure (PS) Name) show an relatively downward trend from stage 1/2 to stage 3/4. For instance, the glycan numbers 6513, 7613, 7614 are examples of fucosylated glycans having tri or tetra-antennary sialic acids. The glycan numbers 6503, 7603, 7604 are examples of non-fucosylated glycans having tri or tetra-antennary sialic acids.

### VI.F. General Methodology System for Diagnosis of Ovarian Cancer Based on Table 43C

[0708] In another embodiment, process 600B may be implemented using Table 43C instead of Table 43B. In some cases, at least one peptide structure includes a glycopeptide structure having a peptide sequence and a glycan structure linked to the peptide sequence at a linking site of the peptide sequence, as identified in Table 43C, with the peptide sequence being one of SEQ ID NOS: 475-499 in Table 43C.

[0709] The group of peptide structures in Table 43C includes peptide structures that have been determined relevant to distinguishing between early stage (stages 1 and 2) or late stage (stages 3 and 4) EOC.

[0710] In one or more embodiments, the at least 1 peptide structure includes at least 1, at least 2, at least 3, at least 4, at least 5, at least 6, at least 7, at least 8, at least 9, at least 10, at least 11, at least 12, at least 13, at least 14, at least 15, at least 16, at least 17, at least 18, at least 19, at least 20, at least 21, at least 22, at least 23, at least 23, at least 24, or all 25 of the peptide SEQ ID NOS: 475-499 identified in Table 43C.

TABLE 43C
Group of Peptide Structures Associated with Ovarian Cancer
(may be used to distinguish between early state v. late stage ovarian cancer)

| | | | | Linking | | |
|---|---|---|---|---|---|---|
| | | | | Site | Linking | |
| | | | | Position | Site | |
| | | | | in | Position in | Glycan |
| PPS- | SEQ ID | Peptide Structure | | Protein | Peptide | Structure |
| ID NO | INO | (PS) NAME | Peptide Sequence | Sequence | Sequence | GL NO. |
| 255 | 475 | AACT_271_6512 | YTGNASALFILPDQDK | 271 | 4 | 6512 |
| 256 | 476 | AGP1_103_6503 | ENGTISR | 103 | 2 | 6503 |
| 257 | 477 | AGP1_103_6513 | ENGTISR | 103 | 2 | 6513 |
| 258 | 478 | AGP1_103_7614 | ENGTISR | 103 | 2 | 7614 |
| 259 | 479 | AGP1_93_6513 | QDQCIYNTTYLNVQR | 93 | 7 | 6513 |
| 260 | 480 | AGP1_93_7604 | QDQCIYNTTYLNVQR | 93 | 7 | 7604 |
| 261 | 481 | AGP1_93_7613 | QDQCIYNTTYLNVQR | 93 | 7 | 7613 |
| 262 | 482 | AGP1_93_7614 | QDQCIYNTTYLNVQR | 93 | 7 | 7614 |
| 263 | 483 | AGP12_56_6503 | NEEYNK | 56 | 5 | 6503 |
| 264 | 484 | AGP12_72_6503 | SVQEIQATFFYFTPNK | 72 | 15 | 6503 |
| 265 | 485 | AGP12_72_7604 | SVQEIQATFFYFTPNK | 72 | 15 | 7604 |
| 266 | 486 | AGP12_72MC_7604 | SVQEIQATFFYFTPNKT | 72 | 15 | 7604 |
| | | | EDTIFLR | | | |
| 267 | 487 | AGP12_72MC_7614 | SVQEIQATFFYFTPNKT | 72 | 15 | 7614 |
| | | | EDTIFLR | | | |
| 268 | 488 | APOH_162_6503 | VYKPSAGNNSLYR | 162 | 8 | 6503 |
| 269 | 489 | CERU_762_6513 | ELHHLQEQNVSNAFL | 762 | 9 | 6513 |
| | | | DK | | | |
| 270 | 490 | HEMO_187_6503 | SWPAVGNCSSALR | 187 | 7 | 6503 |
| 271 | 491 | HPT_184_6513 | MVSHHNLTTGATLINE | 184 | 6 | 6513 |
| | | | QWLLTTAK | | | |
| 272 | 492 | HPT_207_11915 | NLFLNHSENATAK | 207 | 5, 9 | 5402 or |
| | | | | | | 6503 |
| 273 | 493 | HPT_207_121005 | NLFLNHSENATAK | 207 | 5, 9 | 6502 or |
| | | | | | | 6503 |
| 274 | 494 | HPT_241_6503 | VVLHPNYSQVDIGLIK | 241 | 6 | 6503 |
| 275 | 495 | HPT_241_6513 | VVLHPNYSQVDIGLIK | 241 | 6 | 6513 |
| 276 | 496 | HPT_241_7613 | VVLHPNYSQVDIGLIK | 241 | 6 | 7613 |
| 277 | 497 | KNG1_205_6513 | ITYSIVQTNCSK | 205 | 9 | 6513 |
| 278 | 498 | KNG1_294_6503 | LNAENNATFYFK | 294 | 6 | 6503 |
| 279 | 499 | TRFE_630_6513 | QQQHLFGSNVTDCSG | 630 | 9 | 6513 |
| | | | NFCLFR | | | |

[0711] In Table 43C, the first three or four characters before the first underscore of the peptide structure (PS) name corresponds to the abbreviation of the protein name. More details on the protein sequence can be found in Table 46 below.

### VI.G. General Methodology System for Diagnosis of Ovarian Cancer Based on Table 43D

[0712] In another embodiment, process 600B may be implemented using Table 43D instead of Table 43B. In some cases, at least one peptide structure includes a glycopeptide structure having a peptide sequence and a glycan structure linked to the peptide sequence at a linking site of the peptide sequence, as identified in Table 43D, with the peptide sequence being one of SEQ ID NOS: 500-549 in Table 43D.

[0713] The group of peptide structures in Table 43D includes peptide structures that have been determined relevant to distinguishing between early stage (stages 1 and 2) or late stage (stages 3 and 4) EOC.

[0714] In one or more embodiments, the at least 1 peptide structure includes at least 1, at least 2, at least 3, at least 4, at least 5, at least 6, at least 7, at least 8, at least 9, at least 10, at least 11, at least 12, at least 13, at least 14, at least 15, at least 16, at least 17, at least 18, at least 19, at least 20, at least 21, at least 22, at least 23, at least 23, at least 24, at least 25, at least 26, at least 27, at least 28, at least 29, at least 30, at least 31, at least 32, at least 33, at least 34, at least 35, at least 36, at least 37, at least 38, at least 39, at least 40, at least 41, at least 42, at least 43, at least 44, at least 45, at least 46, at least 47, at least 48, at least 49, or all 50 of the peptide SEQ ID NOS: 500-549 identified in Table 43D.

TABLE 43D
Group of Peptide Structures Associated with Ovarian Cancer
(may be used to distinguish between early state v. late stage ovarian cancer)

| | | | | | Linking | Linking | | |
|---|---|---|---|---|---|---|---|---|
| PS- | | | Prot | Pep | Site Pos. | Site Pos. | Glycan | Monoisotopic |
| ID | | | SEQ ID | SEQ ID | in Protein | in Peptide | Structure | mass |
| NO. | PS-Name | Protein Name | NO. | NO. | Seq | Seq | GL NO. | (Da) |
| 280 | A1AT_107_6512 | Alpha-1- | 421 | 500 | 107 | 14 | 6512 | 6406.779 |
| | | antitrypsin | | | | | | |
| 281 | A2MG_1424_6501 | Alpha-2- | 420 | 501 | 1424 | 3 | 6501 | 4440.983 |
| | | macroglobulin | | | | | | |
| 282 | A2MG_1424_6511 | Alpha-2- | 420 | 502 | 1424 | 3 | 6511 | 4587.041 |
| | | macroglobulin | | | | | | |
| 283 | AACT_106_6503 | Alpha-1- | 419 | 503 | 106 | 2 | 6503 | 5260.187 |
| | | antichymotrypsin | | | | | | |
| 284 | AACT_106_7604 | Alpha-1- | 419 | 504 | 106 | 2 | 7604 | 5916.415 |
| | | antichymotrypsin | | | | | | |
| 285 | AACT_106_7614 | Alpha-1- | 419 | 505 | 106 | 2 | 7614 | 6062.472 |
| | | antichymotrypsin | | | | | | |
| 286 | AACT_271_6502 | Alpha-1- | 419 | 506 | 271 | 4 | 6502 | 4321.778 |
| | | antichymotrypsin | | | | | | |
| 287 | AACT_271_6503 | Alpha-1- | 419 | 507 | 271 | 4 | 6503 | 4612.873 |
| | | antichymotrypsin | | | | | | |
| 288 | AGP12_56_6503 | Alpha-1-acid | 418 or 463 | 508 | 56 | 5 | 6503 | 3656.34 |
| | | glycoprotein 1 | | | | | | |
| | | and/or 2 | | | | | | |
| 289 | AGP12_72MC_6503 | Alpha-1-acid | 418 or 463 | 509 | 72 | 15 | 6503 | 5755.449 |
| | | glycoprotein 1 | | | | | | |
| | | and/or 2 | | | | | | |
| 290 | AGP12_72MC6513 | Alpha-1-acid | 418 or 463 | 510 | 72 | 15 | 6513 | 5901.507 |
| | | glycoprotein 1 | | | | | | |
| | | and/or 2 | | | | | | |
| 291 | AGP12_72MC_7613 | Alpha-1-acid | 418 or 463 | 511 | 72 | 15 | 7613 | 6266.639 |
| | | glycoprotein 1 | | | | | | |
| | | and/or 2 | | | | | | |
| 292 | AGP12_72MC7614 | Alpha-1-acid | 418 or 463 | 512 | 72 | 15 | 7614 | 6557.734 |
| | | glycoprotein 1 | | | | | | |
| | | and/or 2 | | | | | | |
| 293 | AGP12_72_6503 | Alpha-1-acid | 418 or 463 | 513 | 72 | 15 | 6503 | 4779.946 |
| | | glycoprotein 1 | | | | | | |
| | | and/or 2 | | | | | | |
| 294 | AGP12_72_7603 | Alpha-1-acid | 418 or 463 | 514 | 72 | 15 | 7603 | 5145.079 |
| | | glycoprotein 1 | | | | | | |
| | | and/or 2 | | | | | | |
| 295 | AGP12_72_7604 | Alpha-1-acid | 418 or 463 | 515 | 72 | 15 | 7604 | 5436.174 |
| | | glycoprotein 1 | | | | | | |
| | | and/or 2 | | | | | | |
| 296 | AGP1_103_6503 | Alpha-1-acid | 418 | 516 | 103 | 2 | 6503 | 3636.382 |
| | | glycoprotein 1 | | | | | | |
| 297 | AGP1_103_6513 | Alpha-1-acid | 418 | 517 | 103 | 2 | 6513 | 3782.44 |
| | | glycoprotein 1 | | | | | | |
| 298 | AGP1_103_7602 | Alpha-1-acid | 418 | 518 | 103 | 2 | 7602 | 3710.419 |
| | | glycoprotein 1 | | | | | | |
| 299 | AGP1_103_7604 | Alpha-1-acid | 418 | 519 | 103 | 2 | 7604 | 4292.61 |
| | | glycoprotein 1 | | | | | | |
| 300 | AGP1_103_7614 | Alpha-1-acid | 418 | 520 | 103 | 2 | 7614 | 4438.668 |
| | | glycoprotein 1 | | | | | | |
| 301 | AGP1_93_6503 | Alpha-1-acid | 418 | 521 | 93 | 7 | 6503 | 4775.889 |
| | | glycoprotein 1 | | | | | | |
| 302 | AGP1_93_7602 | Alpha-1-acid | 418 | 522 | 93 | 7 | 7602 | 4849.926 |
| | | glycoprotein 1 | | | | | | |
| 303 | AGP1_93_7603 | Alpha-1-acid | 418 | 523 | 93 | 7 | 7603 | 5141.022 |
| | | glycoprotein 1 | | | | | | |
| 304 | AGP1_93_7604 | Alpha-1-acid | 418 | 524 | 93 | 7 | 7604 | 5432.117 |
| | | glycoprotein 1 | | | | | | |
| 305 | AGP1_93_7612 | Alpha-1-acid | 418 | 525 | 93 | 7 | 7612 | 4995.984 |
| | | glycoprotein 1 | | | | | | |
| 306 | AGP1_93_7613 | Alpha-1-acid | 418 | 526 | 93 | 7 | 7613 | 5287.079 |
| | | glycoprotein 1 | | | | | | |
| 307 | AGP1_93_7614 | Alpha-1-acid | 418 | 527 | 93 | 7 | 7614 | 5578.175 |
| | | glycoprotein 1 | | | | | | |
| 308 | AGP2_103_6503 | Alpha-1-acid | 463 | 528 | 103 | 2 | 6503 | 3622.367 |
| | | glycoprotein 2 | | | | | | |
| 309 | AGP2_103_6513 | Alpha-1-acid | 463 | 529 | 103 | 2 | 6513 | 3768.425 |
| | | glycoprotein 2 | | | | | | |
| 310 | AGP2_103_7604 | Alpha-1-acid | 463 | 530 | 103 | 2 | 7604 | 4278.594 |
| | | glycoprotein 2 | | | | | | |
| 311 | APOH_162_6503 | Beta-2- | 425 | 531 | 162 | 8 | 6503 | 4328.747 |
| | | glycoprotein1 | | | | | | |
| 312 | APOH_253_5412 | Beta-2- | 425 | 532 | 253 | 3 | 5412 | 3600.389 |
| | | glycoprotein1 | | | | | | |
| 313 | CERU_397_6513 | Ceruloplasmin | 300 | 533 | 397 | 2 | 6513 | 5133.049 |
| 314 | CERU_762_6503 | Ceruloplasmin | 300 | 534 | 762 | 9 | 6503 | 4881.997 |
| 315 | FETUA_156_6503 | Alpha-2-HS- | 444 | 535 | 156 | 12 | 6503 | 4631.839 |
| | | glycoprotein | | | | | | |
| 316 | FETUA_156_6513 | Alpha-2-HS- | 444 | 536 | 156 | 12 | 6513 | 4777.897 |
| | | glycoprotein | | | | | | |
| 317 | FETUA_176_6513 | Alpha-2-HS- | 444 | 537 | 176 | 11 | 6513 | 5371.204 |
| | | glycoprotein | | | | | | |
| 318 | HEMO_187_6503 | Hemopexin | 302 | 538 | 187 | 7 | 6503 | 4264.662 |
| 319 | HEMO_187_6513 | Hemopexin | 302 | 539 | 187 | 7 | 6513 | 4410.719 |
| 320 | HPT_184_6513 | Haptoglobin | 304 | 540 | 184 | 6 | 6513 | 5685.443 |
| 321 | HPT_207_11904 | Haptoglobin | 304 | 541 | 207 or 211 | 5 or 9 | 5402 or 6502 | 6232.403 |
| 322 | HPT_207_11914 | Haptoglobin | 304 | 542 | 207 or 211 | 5 or 9 | 5402 or 6512 | 6378.461 |
| 323 | HPT_207_11915 | Haptoglobin | 304 | 543 | 207 or 211 | 5 or 9 | 5402 or 6513 | 6669.557 |
| 324 | HPT_207_121005 | Haptoglobin | 304 | 544 | 207 or 211 | 5 or 9 | 6502 or 6503 | 6888.631 |
| 325 | HPT_241_6511 | Haptoglobin | 304 | 545 | 241 | 6 | 6511 | 4218.871 |
| 326 | HPT_241_6512 | Haptoglobin | 304 | 546 | 241 | 6 | 6512 | 4509.966 |
| 327 | HPT_241_6513 | Haptoglobin | 304 | 547 | 241 | 6 | 6513 | 4801.062 |
| 328 | HPT_241_7613 | Haptoglobin | 304 | 548 | 241 | 6 | 7613 | 5166.194 |
| 329 | KNG1_294_6503 | Kininogen-1 | 464 | 549 | 294 | 6 | 6503 | 4291.683 |

[0715] With respect to Tables 41, 42, 43A, 43B, 43C, and 43D, they include the Peptide Structure (PS) Name (e.g., KNG1_294_6503), which is a reference code for the protein name (e.g., KNG1), followed by the glycan linking site position in the protein (e.g., the number 294 that is preceded by an underscore and represents a sequential amino acid position in protein KNG1), and followed by the glycan structure GL number (e.g., the number 6503 that is preceded by an underscore and represents a glycan composition Hex(6)HexNAc(5)Fuc(0)NeuAc(3)). The Peptide Structure (PS) Name of contains a prefix that represents an abbreviation (that may include a combination of letters and numbers) for a protein abbreviation that corresponds to the Protein Abbreviation of Table 46. The term Linking Site Pos. in Protein Sequence is a number that refers to the sequential position of an amino acid of the corresponding protein in which a glycan is attached. For the Linking Site Pos. in Protein Sequence, the amino acid position of the peptide sequence is defined by the sequentially numbered order of amino acids based on the Uniprot ID of the corresponding protein for the peptide sequence. The term Linking Site Pos. in Peptide Sequence is a number that refers to the sequential position of an amino acid of the corresponding peptide in which a glycan is attached. For the Linking Site Pos. in peptide Sequence, the amino acid position of the peptide sequence is defined by the sequentially numbered order of amino acids for the peptide sequence. The term Glycan Structure GL No. is a number that corresponds to a symbol structure and a composition of the glycan as indicated in Table 47. In some embodiments, the term AGP12 for SEQ ID NOs: 465-466 represent that the glycopeptide is a fragment of either AGP1 or AGP2.

[0716] In some instances, if the first number subsequent to the first underscore in the Peptide Structure (PS) NAME is inconsistent with the Glycan Linking Site Pos. in Protein Sequence column, then the Glycan Linking Site Pos. in Protein Sequence column should be used for identification of the peptide. In some instances, if the second number subsequent to the second underscore in the Peptide Structure (PS) NAME is inconsistent with the Glycan Structure GL NO column, then the Glycan Structure GL NO column should be used for identification of the glycan portion of the glycopeptide. If the Peptide Structure (PS) NAME does not contain any numbers, then the peptide is non-glycosylated. In some instances of the Peptide Structure (PS) NAME, subsequent to the prefix, there is a number noted with the notation MC that indicates that there was a missed cleavage at position in the peptide sequence as noted by the number.

### VI.H. Training a Model

[0717] FIG. 7A illustrates and example flowchart of a process 700a for training a model to diagnose a subject with one of a plurality of states associated with non-alcoholic steatohepatitis (NASH) progression, in accordance with various embodiments. Process 700a may be implemented using, for example, analysis system 300 as described in FIG. 3. In various embodiments, process 700a may be performed to train model 314 in FIG. 3.

[0718] Step 710a includes receiving quantification data for a panel of peptide structures for a plurality of subjects, each diagnosed with one of the plurality of states associated with NASH progression, wherein the quantification data comprises a plurality of peptide structure profiles for the plurality of subjects and identifies a corresponding state of the plurality of states for each peptide structure profile of the plurality of peptide structure profiles.

[0719] In various embodiments, the quantification data for the panel of peptide structures for the plurality of subjects diagnosed with the plurality of states comprises at least one of an abundance, a relative abundance, a normalized abundance, a relative quantity, an adjusted quantity, a normalized quantity, a relative concentration, an adjusted concentration, or a normalized concentration. In various embodiments, the quantification data for the panel of peptide structures for the plurality of subjects diagnosed with the plurality of states comprises normalized abundances.

[0720] Step 720a includes training a machine learning model using the quantification data to determine which state of the plurality of states a biological sample from the subject corresponds. In various embodiments, the machine learning model comprises a logistic regression model. In various embodiments, the logistic regression model may be a LASSO regularization model or a logistic regression with Ridge regularization.

[0721] The plurality of states may include, for example, at least one of a, early stage non-alcoholic steatohepatitis (NASH) state, a late stage NASH state, or a healthy state.

[0722] In various embodiments, the training the machine learning model comprises: training the machine learning model using a portion of the quantification data corresponding to a set of peptide structures that is a subset of the panel of peptide structures to determine which state of the plurality of states the biological sample from the subject corresponds.

[0723] In various embodiments, process 700a can further include identifying the set of peptide structures as the subset of the plurality of peptide structures relevant to the determining which state of the plurality of states the biological sample from the subject corresponds based on at least one of fold-changes, false discovery rates, or p-values computed as part of the differential expression analysis.

[0724] In various embodiments, process 700a can further include performing a differential expression analysis using the quantification data for the plurality of subjects. In various embodiments, process 700a can further include identifying the set of peptide structures as the subset of the plurality of peptide structures relevant to the determining which state of the plurality of states the biological sample from the subject corresponds based on at least one of fold-changes, false discovery rates, or p-values computed as part of the differential expression analysis.

[0725] In various embodiments, process 700a can further include determining normalized abundance for the panel of peptide structures based on a relative abundance of the peptide structures and an average relative raw abundance of peptide structure in a reference serum sample. In various embodiments, process 700a can further include determining relative abundance based on a raw abundance of the peptide structures and a raw abundance of a glycosylated peptide from a common glycoprotein in the panel.

[0726] Turning attention to FIG. 7B, an example flowchart of a process 700b is provided for training a model to detect the presence of non-alcoholic steatohepatitis (NASH) in a subject, in accordance with various embodiments. Process 700b may be implemented using, for example, analysis system 300 as described in FIG. 3. In various embodiments, process 700b may be performed to train model 314 in FIG. 3.

[0727] Step 710b includes receiving quantification data for a panel of peptide structures for a plurality of subjects, each assessed for the presence of NASH, wherein the quantification data comprises a plurality of peptide structure profiles for the plurality of subjects and identifies the presence or absence of NASH for each peptide structure profile of the plurality of peptide structure profiles.

[0728] In various embodiments, the quantification data for the panel of peptide structures for the plurality of subjects assessed for the presence of NASH, comprises at least one of an abundance, a relative abundance, a normalized abundance, a relative quantity, an adjusted quantity, a normalized quantity, a relative concentration, an adjusted concentration, or a normalized concentration. In various embodiments, the quantification data for the panel of peptide structures for the plurality of subjects assessed for the presence of NASH, comprises normalized abundances.

[0729] Step 720b includes training a machine learning model using the quantification data to determine the presence or absence of NASH in a biological sample corresponding to the subject. In various embodiments, the machine learning model comprises a logistic regression model. In various embodiments, the logistic regression model may be a LASSO regularization model or a logistic regression with Ridge regularization.

[0730] In various embodiments, the training the machine learning model can include training the machine learning model using a portion of the quantification data corresponding to a set of peptide structures that is a subset of the panel of peptide structures to determine the presence or absence of NASH in a biological sample corresponding to the subject.

[0731] In various embodiments, process 700b can further include identifying the set of peptide structures as the subset of the plurality of peptide structures relevant to the determining the presence or absence of NASH in a biological sample corresponding to the subject, based on at least one of fold-changes, false discovery rates, or p-values computed as part of the differential expression analysis.

[0732] In various embodiments, process 700b can further include performing a differential expression analysis using the quantification data for the plurality of subjects. In various embodiments, process 700b can further include identifying the set of peptide structures as the subset of the plurality of peptide structures relevant to the determining which state of the plurality of states the biological sample from the subject corresponds based on at least one of fold-changes, false discovery rates, or p-values computed as part of the differential expression analysis.

[0733] In various embodiments, process 700b can further include determining normalized abundance for the panel of peptide structures based on a relative abundance of the peptide structures and an average relative raw abundance of peptide structure in a reference serum sample. In various embodiments, process 700b can further include determining relative abundance based on a raw abundance of the peptide structures and a raw abundance of a glycosylated peptide from a common glycoprotein in the panel.

[0734] The peptide structures selected for training may be peptide structures identified from, for example, a differential expression analysis performed using initial training data to compare the quantification data for peptide structures for a first portion of the plurality of subjects diagnosed with early stage NASH, a second portion of the plurality of subjects diagnosed with late stage NASH, and a third portion of the plurality of subjects diagnosed with a non-NASH condition (e.g., a healthy state, a benign hepatic mass, liver disease-free state, etc.).

[0735] For example, comparisons may be performed to compare peptide structure quantification data between the first portion of subjects with early stage NASH versus the third portion of subjects with the non-NASH condition (e.g., the control state), to compare the second portion of subjects with late stage NASH versus the first portion of subjects with early stage NASH, and/or to compare the second portion of subjects with late stage NASH versus the third portion of subjects with the non-NASH condition. In various embodiments, comparisons may be performed to compare peptide structure quantification data between those subjects having NASH (e.g., the first and second portions of subjects) with the third portion of subjects with the non-NASH condition In some embodiments, the comparisons may be normalized and compared to one another.

[0736] In various embodiments, the biological sample can include at least one of blood, serum, or plasma. In various embodiments, the quantification data is generated using a liquid chromatography/mass spectrometry (LC/MS) system. In various embodiments, the quantification data is generated using multiple reaction monitoring mass spectrometry (MRM-MS).

[0737] Tables 2A-2B and 3A-3B below indicate the respective fold changes (FC), false discovery rates (FDR), and p-values computed based on such comparisons.

TABLE 2A
Various embodiments of Differential Expression Analysis for NASH v.
Control

| PS-ID | PS- | NASH/Control | NASH/Control | NASH/Control |
|---|---|---|---|---|
| NO. | NAME | (fold change) | (FDR) | (p-value) |
| PS-01 | A1AT_271_5402 | 1.054312229 | 4.13E-05 | 0.000120543 |
| PS-02 | A2MG_1424_5402 | 1.238837044 | 9.45E-09 | 5.38E-08 |
| PS-03 | A2MG_1424_NONGLYCOSYL | 0.851126574 | 6.93E-11 | 6.24E-10 |
| | ATED | | | |
| PS-04 | AACT_271_7602 | 0.768626602 | 0.003600496 | 0.007221805 |
| PS-05 | AGP12_72_7604 | 0.675408636 | 2.90E-16 | 5.02E-15 |
| PS-06 | APOB_3895_5401 | 0.91828099 | 0.023279651 | 0.04059316 |
| PS-07 | APOC3_74_1101 | 0.904569791 | 0.000102696 | 0.000276245 |
| PS-08 | HRG_271_2202 | 1.255244922 | 6.36E-11 | 5.81E-10 |
| PS-09 | IGA12_144_4401 | 0.879950635 | 0.039833377 | 0.06550797 |
| PS-10 | IGG1_297_5410 | 0.910938596 | 0.017424647 | 0.031006936 |
| PS-11 | IGG2_297_4411 | 1.086504313 | 0.00304694 | 0.006164945 |
| PS-12 | IGG2_297_5410 | 1.25183147 | 3.31E-05 | 9.86E-05 |
| PS-13 | KLKB1_494MC_5402 | 1.347101383 | 5.60E-05 | 0.000156739 |
| PS-14 | ANT3_FATTFYQHLADSK | 0.843303121 | 0.000130833 | 0.000341346 |
| PS-15 | FETUA_346_NONGLYCOSYL | 0.938853736 | 0.008158095 | 0.015427025 |
| | ATED | | | |
| PS-16 | HEMO_187_5401 | 1.008809693 | 0.723607817 | 0.776172837 |
| PS-17 | APOB_983_5402 | 1.126456927 | 2.57E-08 | 1.35E-07 |
| PS-18 | AGP1_93_7604 | 1.17642544 | 0.026191362 | 0.047054137 |
| PS-19 | KLKB1_453_5402 | 0.861510837 | 5.77E-05 | 0.000199229 |
| PS-20 | CO6_324_5402 | 0.92555625 | 0.038505178 | 0.064713542 |
| PS-21 | THRB_121_5412 | 0.556950625 | 3.54E-08 | 2.56E-07 |
| PS-22 | CFAH_529_5402 | 0.767362395 | 1.39E-10 | 1.47E-09 |
| PS-23 | APOD_98_5402 | 1.120941892 | 0.000689412 | 0.001799082 |
| PS-24 | IGG2_297_3500 | 0.366802997 | 4.83E-14 | 7.36E-13 |
| PS-25 | IGG2_297_4500 | 1.005406074 | 0.895720719 | 0.919864134 |
| PS-26 | FHR1_INHGILYDEEK | 1.001651132 | 0.978163586 | 0.985262015 |
| PS-27 | APOC3_74MC_1102 | 0.963939826 | 0.285565799 | 0.361647198 |
| PS-28 | AGP1_93_6503 | 1.079755012 | 0.073575991 | 0.113977093 |
| PS-29 | PLASMAFGA_DSHSLTTNIM | 0.778306506 | 0.000109711 | 0.000292843 |
| | EILR | | | |

TABLE 2B
Various embodiments of Differential Expression Analysis for NASH v.
Control

| PS-ID | | NASH/Control | NASH/Control | NASH/Control |
|---|---|---|---|---|
| NO. | PS-NAME | (fold change) | (FDR) | (p-value) |
| PS-01 | A1AT_271_5402 | 1.054312229 | 4.13E-05 | 0.000120543 |
| PS-02 | A2MG_1424_5402 | 1.238837044 | 9.45E-09 | 5.38E-08 |
| PS-03 | A2MG_1424_NONGLYCOSYL | 0.851126574 | 6.93E-11 | 6.24E-10 |
| | ATED | | | |
| PS-04 | AACT_271_7602 | 0.768626602 | 0.003600496 | 0.007221805 |
| PS-05 | AGP12_72_7604 | 0.675408636 | 2.90E-16 | 5.02E-15 |
| PS-06 | APOB_3895_5401 | 0.91828099 | 0.023279651 | 0.04059316 |
| PS-07 | APOC3_74_1101 | 0.904569791 | 0.000102696 | 0.000276245 |
| PS-08 | HRG_271_2202 | 1.255244922 | 6.36E-11 | 5.81E-10 |
| PS-09 | IGA12_144_4401 | 0.879950635 | 0.039833377 | 0.06550797 |
| PS-10 | IGG1_297_5410 | 0.910938596 | 0.017424647 | 0.031006936 |
| PS-11 | IGG2_297_4411 | 1.086504313 | 0.00304694 | 0.006164945 |
| PS-12 | IGG2_297_5410 | 1.25183147 | 3.31E-05 | 9.86E-05 |
| PS-13 | KLKB1_494MC_5402 | 1.347101383 | 5.60E-05 | 0.000156739 |
| PS-14 | ANT3_FATTFYQHLADSK | 0.843303121 | 0.000130833 | 0.000341346 |

TABLE 3A
Various embodiments of Differential Expression Analysis for NASH (early)
vs. NASH (late)

| | | NASH(early)/ | NASH(early)/ | NASH(early)/ |
|---|---|---|---|---|
| PS-ID | | NASH(late) | NASH(late) | NASH(late) |
| NO. | PS-NAME | (fold change) | (p-value) | (FDR) |
| PS-01 | A1AT_271_5402 | 1.066606018 | 0.001372478 | 0.476249955 |
| PS-02 | A2MG_1424_5402 | 1.117846319 | 0.011263425 | 0.55644186 |
| PS-03 | A2MG_1424_ | 1.109923799 | 0.009906059 | 0.55644186 |
| | NONGLYCOSYLATED | | | |
| PS-04 | AACT_271_7602 | 1.521697843 | 0.005746988 | 0.55644186 |
| PS-05 | AGP12_72_7604 | 0.80400926 | 0.006567336 | 0.55644186 |
| PS-06 | APOB_3895_5401 | 1.185989144 | 0.020300622 | 0.55644186 |
| PS-07 | APOC3_74_1101 | 1.125949872 | 0.013376141 | 0.55644186 |
| PS-08 | HRG_271_2202 | 0.883300505 | 0.0301975 | 0.626007905 |
| PS-09 | IGA12_144_4401 | 0.798483588 | 0.016073703 | 0.55644186 |
| PS-10 | IGG1_297_5410 | 1.141726136 | 0.04043055 | 0.626007905 |
| PS-11 | IGG2_297_4411 | 1.09635526 | 0.014837011 | 0.55644186 |
| PS-12 | IGG2_297_5410 | 1.264256382 | 0.006321671 | 0.55644186 |
| PS-13 | KLKB1_494MC_5402 | 0.708348357 | 0.022450104 | 0.55644186 |
| PS-14 | ANT3_ | 0.831868046 | 0.02692621 | 0.622892994 |
| | FATTFYQHLADSK | | | |
| PS-15 | FETUA_346_ | 1.002306078 | 0.945461457 | 0.98419818 |
| | NONGLYCOSYLATED | | | |
| PS-16 | HEMO_187_5401 | 0.94387067 | 0.283596853 | 0.932025086 |
| PS-17 | APOB_983_5402 | 1.042027243 | 0.273233337 | 0.932025086 |
| PS-18 | AGP1_93_7604 | 0.948432478 | 0.698954096 | 0.999930262 |
| PS-19 | KLKB1_453_5402 | 1.109708091 | 0.132280288 | 0.940464559 |
| PS-20 | CO6_324_5402 | 0.924273366 | 0.257441751 | 0.999930262 |
| PS-21 | THRB_121_5412 | 1.205754957 | 0.355266209 | 0.999930262 |
| PS-22 | CFAH_529_5402 | 1.022835534 | 0.753980296 | 0.999930262 |
| PS-23 | APOD_98_5402 | 0.952188995 | 0.441535899 | 0.990760008 |
| PS-24 | IGG2_297_3500 | 0.908028279 | 0.501329086 | 0.990760008 |
| PS-25 | IGG2_297_4500 | 1.082731843 | 0.339975891 | 0.990760008 |
| PS-26 | FHR1_INHGILYDEEK | 0.842506689 | 0.064337175 | 0.731967199 |
| PS-27 | APOC3_74MC_1102 | 0.814902387 | 0.000344328 | 0.238963329 |
| PS-28 | AGP1_93_6503 | 1.20277365 | 0.013358017 | 0.55644186 |
| PS-29 | PLASMAFGA_ | 1.030093046 | 0.672077502 | 0.98419818 |
| | DSHSLTTNIMEILR | | | |

TABLE 3B
Various embodiments of Differential Expression Analysis for NASH (early)
vs. NASH (late)

| | | NASH(early)/ | NASH(early)/ | NASH(early)/ |
|---|---|---|---|---|
| PS-ID | | NASH(late) | NASH(late) | NASH(late) |
| NO. | PS-NAME | (fold change) | (p-value) | (FDR) |
| PS-01 | A1AT_271_5402 | 1.066606018 | 0.001372478 | 0.476249955 |
| PS-02 | A2MG_1424_5402 | 1.117846319 | 0.011263425 | 0.55644186 |
| PS-03 | A2MG_1424_ | 1.109923799 | 0.009906059 | 0.55644186 |
| | NONGLYCOSYLATED | | | |
| PS-04 | AACT_271_7602 | 1.521697843 | 0.005746988 | 0.55644186 |
| PS-05 | AGP12_72_7604 | 0.80400926 | 0.006567336 | 0.55644186 |
| PS-06 | APOB_3895_5401 | 1.185989144 | 0.020300622 | 0.55644186 |
| PS-07 | APOC3_74_1101 | 1.125949872 | 0.013376141 | 0.55644186 |
| PS-08 | HRG_271_2202 | 0.883300505 | 0.0301975 | 0.626007905 |
| PS-09 | IGA12_144_4401 | 0.798483588 | 0.016073703 | 0.55644186 |
| PS-10 | IGG1_297_5410 | 1.141726136 | 0.04043055 | 0.626007905 |
| PS-11 | IGG2_297_4411 | 1.09635526 | 0.014837011 | 0.55644186 |
| PS-12 | IGG2_297_5410 | 1.264256382 | 0.006321671 | 0.55644186 |
| PS-13 | KLKB1_494MC_5402 | 0.708348357 | 0.022450104 | 0.55644186 |
| PS-14 | ANT3_ | 0.831868046 | 0.02692621 | 0.622892994 |
| | FATTFYQHLADSK | | | |

[0738] FIG. 18 is a flowchart of a process for training a model to diagnose a subject with respect to a pancreatic cancer (PC) disease state in accordance with one or more embodiments. Process 1800 may be implemented using, for example, at least a portion of workflow 100 as described in FIGS. 1, 2A, and 2B and/or analysis system 300 as described in FIG. 3. In some embodiments, process 1800 may be one example of an implementation for training the model used in the process 1700 in FIG. 17.

[0739] Step 1802 includes receiving quantification data for a panel of peptide structures for a plurality of subjects. The plurality of subjects includes a first portion diagnosed with a negative diagnosis of a PC disease state and a second portion diagnosed with a positive diagnosis of the PC disease state. The quantification data comprises a plurality of peptide structure profiles for the plurality of subjects.

[0740] Step 1804 includes training a machine learning model using the quantification data to diagnose a biological sample with respect to the PC disease state using a group of peptide structures associated with the PC disease state (e.g., the group of peptide structures is identified in Table 16). The group of peptide structures is listed in Table 16 with respect to relative significance to diagnosing the biological sample. Step 1804 can include training the machine learning using a portion of the quantification data corresponding to a training group of peptide structures included in the plurality of peptide structures.

[0741] Training data can be used for training the supervised machine learning model. The training data can include a plurality of peptide structure profiles for a plurality of subjects and a plurality of subject diagnoses for the plurality of subjects. The plurality of subject diagnoses can include a positive diagnosis for any subject of the plurality of subjects determined to have the PC disease state and a negative diagnosis for any subject of the plurality of subjects determined not to have the PC disease state.

[0742] The machine learning model can include a binary classification model. Some binary classification models can include logistical regression models. Some logistical regression models can include LASSO regression models.

[0743] An alternative or additional step in process 1800 can include performing a differential expression analysis using initial training data to compare a first portion of the plurality of subjects diagnosed with the positive diagnosis for the PC disease state versus a second portion of the plurality of subjects diagnosed with the negative diagnosis for the PC disease state.

[0744] An alternative or additional step in process 1800 can include identifying a training group of peptide structures based on the differential expression analysis for use as prognostic markers for the PC disease state.

[0745] An alternative or additional step in process 1800 can include forming the training data based on the training group of peptide structures identified.

[0746] An alternative or additional step in process 1800 can include identifying a training group of peptide structures based on the differential expression analysis, wherein the training group of peptide structures is a subset of the plurality of peptide structures relevant to diagnosing the PC disease state. The subset may be identified based on at least one of fold-changes, false discovery rates, or p-values computed as part of the differential expression analysis.

[0747] An alternative or additional step in process 1800 can include training a machine learning model, using the quantification data for the training group of peptide structures, to diagnose a subject of a biological sample with respect to the PC disease state using a group of peptide structures associated with the PC disease state. The group of peptide structures may be a subset of the training group of peptide structures and is identified in Table 16. The group of peptide structures is listed in Table 16 with respect to relative significance to making the diagnosis.

[0748] In various embodiments, the machine learning model is a supervised machine learning model that is trained to determine weight coefficients for a panel of peptide structures such that a first portion of the weight coefficients for a first portion of the panel of peptide structures are non-zero and a second portion of the weight coefficients for a second portion of the panel of peptide structures are zero (or, alternatively, substantially close to zero so as to not be statistically significant).

[0749] For example, the machine learning model may be a LASSO regression model that identifies the peptide structures of Table 17A, 17B, or 17C below, which include at least a portion of the group of peptide structures identified in Table 16. The markers used for training of the LASSO regression model may, in one or more embodiments, additionally include one or more other peptide structure markers.

[0750] In one or more embodiments, a subset of the markers identified in Table 17A, 17B, or 17C may be used for training of the LASSO regression model. Alternatively, the markers identified in Table 17 may be a subset for training of the LASSO regression model. For example, the LASSO regression model may be trained using at least one other marker in addition to those identified in Table 17.

### VI.I. Training a Model for Diagnosis of NSCLC

[0751] FIG. 36 illustrates a flow diagram 3600 of a method for training a model to diagnose a subject with one of a plurality of states associated with NSCLC, in accordance with the presently disclosed embodiments. The flow diagram 3600 may be performed utilizing one or more processing devices (e.g., computing platform 302 as discussed above with respect to FIG. 3) that may include hardware (e.g., a general purpose processor, a graphic processing unit (GPU), an application-specific integrated circuit (ASIC), a system-on-chip (SoC), a microcontroller, a field-programmable gate array (FPGA), a central processing unit (CPU), an application processor (AP), a visual processing unit (VPU), a neural processing unit (NPU), a neural decision processor (NDP), a deep learning processor (DLP), a tensor processing unit (TPU), neuromorphic processing unit (NPU), or any other processing device(s) that may be suitable for processing various medical profile data and making one or more decisions based thereon), software (e.g., instructions running/executing on one or more processors), firmware (e.g., microcode), or some combination thereof.

[0752] The flow diagram 3600 may begin at block 3602 with one or more processing devices (e.g., computing platform 302) receiving quantification data for a panel of peptide structures for a plurality of subjects diagnosed with the plurality of states associated with the NSCLC, wherein the quantification data comprises a plurality of peptide structure profiles for the plurality of subjects and identifies a corresponding state of the plurality of states for each peptide structure profile of the plurality of peptide structure profiles. The flow diagram 3600 may then conclude at block 3604 with one or more processing devices (e.g., computing platform 302) training a machine-learning model to determine a state of the plurality of states a biological sample from the subject corresponds based on the quantification data.

[0753] In some embodiments, the machine-learning model includes a regularized regression model (e.g., LASSO regression model) trained and evaluated, for example, over one or more iterations using a first set of peptide structure coefficients set forth in Table 39 for all stages of NSCLC (stages 1-4), using a second set of peptide structure coefficients set forth in Table 39 for early-stage NSCLC (stages 1-2), and using a third set of peptide structure coefficients set forth in Table 39 for late-stage NSCLC (stages 3-4).

### VI.J. Training a Model to Predict Ovarian Cancer (e.g., Epithelial Ovarian Cancer)

[0754] FIG. 49 is a flowchart of a process for training a model to diagnose a subject with respect to an ovarian cancer disease state in accordance with one or more embodiments. Process 700 may be implemented using, for example, at least a portion of workflow 100 as described in FIGS. 1, 2A, and 2B and/or analysis system 300 as described in FIG. 3. In some embodiments, process 700 may be one example of an implementation for training the model used in the process 500 in FIGS. 47, 48A, or 48B.

[0755] Step 702 includes receiving quantification data for a panel of peptide structures for a plurality of subjects. The plurality of subjects may include a first portion diagnosed with a negative diagnosis of an ovarian cancer disease state and a second portion diagnosed with a positive diagnosis of the ovarian cancer disease state. The plurality of subjects may include a first portion having early stage EOC and a second portion have late stage EOC. The quantification data comprises an initial plurality of peptide structure profiles for the plurality of subjects. For example, a peptide structure profile in the initial plurality of peptide structure profiles may include a feature associated with a corresponding peptide structure. The feature may be relative abundance, concentration, site occupancy, or some other quantification-based feature. The initial plurality of peptide structure profiles may include, one, two, three, or more profiles for a given peptide structure.

[0756] Step 704 includes training a machine learning model using the quantification data to diagnose a biological sample with respect to the ovarian cancer disease state using a group of peptide structures associated with the ovarian cancer disease state (e.g., the first group of peptide structures is identified in Table 41, the second group of peptide structures is identified in Table 42, the third group of peptide structures is identified in Table 43A). The first, second, and third groups of peptide structures are listed in Tables 41, 42, and 43A, respectively, with respect to relative significance to diagnosing the biological sample as evidencing malignancy (e.g., EOC). Step 704 can include training the machine learning using a portion of the quantification data corresponding to a training group of peptide structures included in the plurality of peptide structures. Step 704 can include training a machine learning model using the quantification data to assess a biological sample with respect to the staging of the ovarian cancer disease state using a group of peptide structures associated with the ovarian cancer disease state such as a group of peptide structures identified in Tables 43B, 43C, or 43D.

[0757] Step 704 may include reducing the plurality of peptide structure profiles using LASSO regression to identify a final group of peptide structures identified in Table 41 above. Step 704 may include reducing the plurality of peptide structure profiles using LASSO regression to identify a final group of peptide structures identified in Table 42 above. Step 704 may include reducing the plurality of peptide structure profiles using LASSO regression to identify a final group of peptide structures identified in Tables 43B, 43C, or 43D above.

[0758] Training data can be used for training the supervised machine learning model. The training data can include a plurality of peptide structure profiles for a plurality of subjects and a plurality of subject diagnoses for the plurality of subjects. The plurality of subject diagnoses can include a positive diagnosis for any subject of the plurality of subjects determined to have the ovarian cancer disease state and a negative diagnosis for any subject of the plurality of subjects determined not to have the ovarian cancer disease state.

[0759] The machine learning model can include a binary classification model. Some binary classification models can include logistical regression models. Some logistical regression models can include LASSO regression models.

[0760] An alternative or additional step in process 700 can include filtering the initial plurality of peptide structure profiles by a coefficient of variation to generate a plurality of peptide structure profiles for use in training the machine learning model. As one example, only those peptide structure profiles having a low coefficient of variation (<20%) were included int the plurality of peptide structure profiles used for training.

[0761] An alternative or additional step in process 700 can include performing a differential expression analysis using initial training data to compare a first portion of the plurality of subjects diagnosed with the positive diagnosis for the ovarian cancer disease state versus a second portion of the plurality of subjects diagnosed with the negative diagnosis for the ovarian cancer disease state.

[0762] An alternative or additional step in process 700 can include identifying a first portion of the plurality of samples for subjects with benign pelvic tumors and malignant pelvic tumors and a second portion of the plurality of samples for subjects with a healthy status. An alternative or additional step in process 700 can include generating a training set of peptide structure profiles for 80% of the first portion and a test set of peptide structure profiles for a remaining 20% of the first portion and the second portion.

[0763] In various embodiments, the machine learning model is a supervised machine learning model that is trained to determine weight coefficients for a panel of peptide structures such that a first portion of the weight coefficients for a first portion of the panel of peptide structures are non-zero and a second portion of the weight coefficients for a second portion of the panel of peptide structures are zero (or, alternatively, substantially close to zero so as to not be statistically significant).

### VI.K. Combined Training and Diagnosis

[0764] The exemplary methodologies described in Section VI. may be used to diagnose a subject who may have FLD or suspected of having from FLD. This diagnosis may be used to determine a method of treatment for a subject. The embodiments described herein may enable faster and more accurate diagnosis of the presence of NASH, including a stage of NASH. Being able to more quickly and accurately diagnose a subject (or patient) that has advanced from non-NASH to NASH in the FLD progression, or who has early stage NASH, may enable treating the subject more quickly, which may lead to a more desirable treatment outcome for the subject. Further, being able to more quickly and accurately determine when a subject has NASH and is at risk for advancement of the stage of NASH, including to late stage NASH, may be particularly useful in reducing the need for hospitalization and avoidance of death. In various embodiments, the severity of one or more symptoms of NASH may be reduced or reversed following use of methods of the disclosure.

[0765] FIG. 8 is a flow chart of a process for classifying a biological sample as corresponding to one of a plurality of states associated with fatty liver disease (FLD) progression in accordance with various embodiments. Process 800 may be implemented using at least a portion of workflow 100 as described FIGS. 1, 2A, and/or 2B and/or analysis system 300 as described in FIG. 3.

[0766] Step 802 includes training a supervised machine learning model using training data. In various embodiments, the training data comprises a plurality of peptide structure profiles for a plurality of training subjects and identifies a corresponding state of the plurality of states for each peptide structure profile of the plurality of peptide structure profiles.

[0767] Step 804 includes receiving peptide structure data corresponding to a set of non-glycosylated peptides or glycopeptides in the biological sample obtained from a subject, such as any one or more from Table 1A.

[0768] Step 806 includes inputting quantification data identified from the peptide structure data for a set of peptide structures into the supervised machine learning model that has been trained. In some embodiments, the set of peptide structures includes at least one peptide structure identified in Table 1A or 1B.

[0769] Step 808 includes analyzing the quantification data using the supervised machine learning model to generate a score.

[0770] Step 810 includes determining that the score falls within a selected range associated with a corresponding state of the plurality of states associated with the FLD progression.

[0771] Step 812 includes generating a diagnosis output that indicates that the biological sample evidences the corresponding state. In some embodiments, the plurality of states includes a non-alcoholic steatohepatitis (NASH) state, a non-NASH (e.g., control or healthy) state, early stage NASH, or late stage NASH.

[0772] FIG. 19 is a flowchart of a process for monitoring a subject for a pancreatic cancer (PC) disease state in accordance with one or more embodiments. Process 1900 may be implemented using, for example, at least a portion of workflow 100 as described in FIGS. 1, 2A, and 2B and/or analysis system 300 as described in FIG. 3.

[0773] Step 1902 includes receiving first peptide structure data for a first biological sample obtained from a subject at a first timepoint.

[0774] Step 1904 includes analyzing the first peptide structure data using a supervised machine learning model to generate a first disease indicator based on at least 1 peptide structure selected from a group of peptide structures identified in Table 16. The group of peptide structures in Table 16 includes a group of peptide structures associated with a PC disease state in accordance with various embodiments. The supervised machine can be a binary classification model. In some embodiments, the binary classification model can be a logistical regression model.

[0775] Step 1906 includes receiving second peptide structure data of a second biological sample obtained from the subject at a second timepoint.

[0776] Step 1908 includes analyzing the second peptide structure data using the supervised machine learning model to generate a second disease indicator based on the at least 1 peptide structure selected from the group of peptide structures identified in Table 16.

[0777] Step 1910 includes generating a diagnosis output based on the first disease indicator and the second disease indicator. Generating the diagnostic output can include comparing the second disease indicator to the first disease indicator.

[0778] In some embodiments, the first disease indicator indicates that the first biological sample evidences the negative diagnosis for the PC disease state and the second biological sample evidences the positive diagnosis for the PC disease. In other embodiments, the diagnosis output identifies whether a non-PC disease state has progressed to the PC disease state, wherein the non-PC disease state includes either a healthy state, a control state, or a benign pancreatitis state.

### VI.L. Combined Training and Diagnosis for Diagnosis of NSCLC

[0779] FIG. 37 illustrates a flow diagram 3700 of a method for treating NSCLC in a subject, in accordance with the presently disclosed embodiments. The flow diagram 3700 may be performed utilizing one or more processing devices (e.g., computing platform 302 as discussed above with respect to FIG. 3) that may include hardware (e.g., a general purpose processor, a graphic processing unit (GPU), an application-specific integrated circuit (ASIC), a system-on-chip (SoC), a microcontroller, a field-programmable gate array (FPGA), a central processing unit (CPU), an application processor (AP), a visual processing unit (VPU), a neural processing unit (NPU), a neural decision processor (NDP), a deep learning processor (DLP), a tensor processing unit (TPU), neuromorphic processing unit (NPU), or any other processing device(s) that may be suitable for processing various medical profile data and making one or more decisions based thereon), software (e.g., instructions running/executing on one or more processors), firmware (e.g., microcode), or some combination thereof.

[0780] The flow diagram 3700 may begin at block 3702 with one or more processing devices (e.g., computing platform 302) receiving peptide structure data corresponding to a set of glycoproteins in the biological sample. The flow diagram 3700 may then continue at block 3704 with one or more processing devices (e.g., computing platform 302) inputting quantification data identified from the peptide structure data for a set of the peptide structures into a machine-learning model trained to identify a disease indicator based on the quantification data, wherein the set of peptide structure data comprises at least one peptide structure identified from a plurality of peptide structures in Table 35 and/or Table 40. The flow diagram 3700 may then continue at block 3706 with one or more processing devices (e.g., computing platform 302) identifying, by the machine-learning model, the disease indicator. The flow diagram 3700 may then continue at block 3708 with one or more processing devices (e.g., computing platform 302) determining a classification for NSCLC based upon the identified disease indicator. The flow diagram 3700 may then conclude at block 3710 with one or more processing devices (e.g., computing platform 302) determining a treatment to treat NSCLC based upon the classification.

[0781] FIG. 38 illustrates a flow diagram 3800 of a method for diagnosing an individual with NSCLC, in accordance with the presently disclosed embodiments. The flow diagram 3800 may be performed utilizing one or more processing devices (e.g., computing platform 302 as discussed above with respect to FIG. 3) that may include hardware (e.g., a general purpose processor, a graphic processing unit (GPU), an application-specific integrated circuit (ASIC), a system-on-chip (SoC), a microcontroller, a field-programmable gate array (FPGA), a central processing unit (CPU), an application processor (AP), a visual processing unit (VPU), a neural processing unit (NPU), a neural decision processor (NDP), a deep learning processor (DLP), a tensor processing unit (TPU), neuromorphic processing unit (NPU), or any other processing device(s) that may be suitable for processing various medical profile data and making one or more decisions based thereon), software (e.g., instructions running/executing on one or more processors), firmware (e.g., microcode), or some combination thereof.

[0782] The flow diagram 3800 may begin at block 3802 with one or more processing devices (e.g., computing platform 302) detecting the presence or amount of at least one structure structures from Table 35 and/or Table 40. The flow diagram 3800 may begin at block 3802 with one or more processing devices (e.g., computing platform 302) detecting the presence or amount of at least one peptide structure structures from Table 40. The flow diagram 3800 may then continue at block 3804 with one or more processing devices (e.g., computing platform 302) inputting a quantification of the detected at least one peptide structure into a machine-learning model trained to generate a class label. The flow diagram 3800 may then continue at block 3806 with one or more processing devices (e.g., computing platform 302) determining if the class label is above or below a threshold for a classification. The flow diagram 3800 may then continue at block 3808 with one or more processing devices (e.g., computing platform 302) identifying a diagnostic classification for a patient based on whether the class label is above or below a threshold for the classification. The flow diagram 3800 may then conclude at block 3810 with one or more processing devices (e.g., computing platform 302) diagnosing the patient as having NSCLC based on the diagnostic classification.

### VII. Exemplary Methodologies for Treatment

### VII.A. Treating NASH

[0783] FIG. 9 is a flowchart of a process for treating a subject for NASH in accordance with various embodiments. Process 900 may be at least partially implemented using at least a portion of workflow 100 as described FIGS. 1, 2A, and/or 2B and/or analysis system 300 as described in FIG. 3.

[0784] Step 902 includes receiving a biological sample. The biological sample may be one that is obtained from a patient, and in specific cases the sample comprises serum.

[0785] Step 904 includes determining a quantity of each peptide structure identified in a predetermined list using an MRM-MS system. The predetermined list may be, for example, the list identified in Table 1A or 1B, or a subset thereof.

[0786] Step 906 includes analyzing the quantity of each peptide structure using a machine learning model to generate a disease indicator.

[0787] Step 908 includes generating a diagnosis output based on the disease indicator that classifies the biological sample as evidencing that the patient has NASH (or the NASH disorder).

[0788] Step 910 includes administering a treatment for NASH to the patient, such as via at least one of intravenous or oral administration of the treatment at therapeutic dosage(s). The treatment may be comprised of one or more therapeutics or derivatives thereof.

[0789] The treatment may include, for example, without limitation, at least one compound or derivative thereof selected from the group consisting of Obeticholic acid (OCA), Tropifexor, Elafibranor, Saroglitazar, Aramchol, Semaglutide, Tirzepatide, Cotadutide, NGM282, MSDC-0602K, Resmetirom, Cenicriviroc, Selonsertib, Emricasan, Simtuzumab, GR-MD-02, and a combination thereof. In various embodiments, as an example a therapeutic dosage for Obeticholic acid (OCA) may include a dosage within a range of 10-25 mg daily.

[0790] Process 900 may include one or more additional steps. For example, process 900 may further include designing the therapeutic for treating the subject in response to determining that the biological sample obtained from the subject evidences NASH. Process 900 may include generating a treatment plan for treating the subject in response to determining that the biological sample obtained from the subject evidences NASH.

### VII.B. Treating NSCLC

[0791] In some embodiments, provided herein are methods of treating NSCLC based upon the presence, amount, and/or relative amount of one or more biomarkers provided herein. In some embodiments, the method comprises treating NSCLC based upon the presence, amount, and/or relative amount of one or more peptide structure from Table 35. In some embodiments, the method comprises treating NSCLC based upon the presence, amount, and/or relative amount of one or more peptide structures from Table 40. In some embodiments, the method comprises classifying a biological sample with respect to a plurality of states associated with NSCLC based upon one or more peptide structure provided herein and selecting a treatment for NSCLC based upon the classification. In some embodiments, the method comprises classifying a biological sample with respect to a plurality of states associated with NSCLC based upon one or more peptide structure provided in Table 35 and/or Table 40 and administering a treatment for NSCLC based upon the classification. In some embodiments, the method comprises classifying a biological sample with respect to a plurality of states associated with NSCLC based upon one or more peptide structure provided herein and administering a treatment for NSCLC based upon the classification. In some embodiments, the method comprises classifying a biological sample with respect to a plurality of states associated with NSCLC based upon one or more peptide structure provided in Table 35 and/or Table 40 and administering a treatment for NSCLC based upon the classification. In some embodiments, the method comprises inputting quantification data identified from peptide structure data for a set of peptides to identify a disease indicator, detecting the presence of a corresponding state associated with NSCLC in response that the disease indicator falls within a selected range, and diagnosing NSCLC. In some embodiments, the peptide structure data comprises one or more peptide structure provided in Table 35. In some embodiments, the peptide structure data comprises one or more peptide structure provided in Table 40. In some embodiments, the method further comprises administering an effective amount of a therapy for NSCLC. In some embodiments, the method further comprises selecting a particular therapy based upon the disease indicator.

[0792] In some embodiments, provided herein is a method of treating NSCLC comprising detecting the presence and/or amount of at least one peptide structure from Table 35 and selecting a NSCLC therapy. In some embodiments, method of treating NSCLC further comprises administering an effective amount of a NSCLC therapy to the individual based upon the presence and/or amount of at least one peptide structure from Table 35. In some embodiments, the diagnosis and/or treatment is based upon the presence and/or amount of at least two, at least three, at least four, at least five, at least 10, at least 15, at least 20, or at least 25 peptide structures from Table 35. In some embodiments, the method of treating NSCLC comprises detecting the presence (or absence) or amount of at least one peptide structure from Table 40 and selecting a NSCLC therapy. In some embodiments, the method of treating NSCLC comprises detecting the presence (or absence) or amount of at least one peptide structure from Table 40 and administering an effective amount of a NSCLC therapy to the individual. In some embodiments, the method further comprises selecting a therapy based upon the presence, and/or amount of the at least one peptide structure from Table 40. In some embodiments, the diagnosis and/or treatment is based upon the presence and/or amount of at least two, at least three, at least four, at least five, at least 10, or at least 15 peptide structures from Table 40.

[0793] In some embodiments, the method comprises selecting a therapy to treat NSCLC. In some embodiments, the method of selecting a therapy for NSCLC comprises inputting quantification data identified from peptide structure data for a set of peptides and/or glycopeptides into one or more machine-learning model trained to identify a disease indicator. In some embodiments, the method of selecting a therapy comprises classifying the sample as having NSCLC or not having NSCLC based upon the disease indicator. In some embodiments, the therapy is selected based upon presence and/or amount of at least one, at least two, at least three, at least four, at least five, at least ten, or at least 15 peptide structures from Table 35 and/or Table 40. In some embodiments, the therapy is selected based upon presence and/or amount of at least one, at least two, at least three, at least four, at least five, at least ten, or at least 15 peptides and/or glycopeptides comprising the amino acid sequence of SEQ ID NOs: 224-296 along with the associated glycan set forth in Table 35. In some embodiments, the presence, absence, and/or amount of one or more peptides and/or glycopeptide is determined by MRM-MS. In some embodiments, the therapy is selected on the basis of the stage of NSCLC. In some embodiments, the therapy is selected on the basis of one or more NSCLC risk factor in combination with the presence, absence, and or amount of one or more peptides or glycopeptides provided herein. In some embodiments, the therapy for NSCLC is selected from the group comprising a surgery, a chemotherapeutic therapy, a patient-specific therapy, a targeted immunotherapy, a radiation procedure, a radiofrequency ablation (RFA) procedure, or a combination thereof. In some embodiments, the surgery comprises the removal of one or more parts of the lung. In some embodiments, the platinum-coordinating compound comprises one of cisplatin, carboplatin, and nedaplatin. In some embodiments, the chemotherapeutic comprises docetaxel, paclitaxel, albumin-bound paclitaxel, vinorelbine, gemcitabine, irinotecan, pemetrexed, tegafur/gimeracil/oteracil, etoposide, or a combination thereof. In some embodiments, the chemotherapeutic therapy is a platinum-doublet regimen. In some embodiments, the chemotherapeutic therapy is a platinum-triple regimen. In some embodiments, the targeted immunotherapy comprises one or more antibody directed towards an immune system checkpoint protein including but not limited to PD-1, PD-L1, and CTLA-4. In some embodiments, the therapy for NSCLC comprises a combination of one or more antibody that targets PD-1, PD-L1, and CTLA-4. In some embodiments, the targeted therapy comprises one or more patient-specific therapy agent selected based on patient-specific changes in tumor cell gene expression including but not limited to changes in KRAS, EGFR, ALK, ROS1, BRAF, RET, MET, and NTRK genes. In some embodiments, the patient-specific therapy is an inhibitor of an oncogene. In some embodiments, the patient-specific therapy is an inhibitor of one or more of KRAS, EGFR, ALK, ROS1, BRAF, MEK, RET, MET, and NTRK. In some embodiments, the radiation procedure comprises the use of high-energy rays or particles to treat NSCLC. In some embodiments, the brachytherapy comprises the placement of radioactive material in or adjacent to the tumor in the airway (e.g., bronchial tubes).

[0794] In some embodiments, the method comprises administering a therapy to treat NSCLC. In some embodiments, the method of administering a therapy comprises inputting quantification data identified from peptide structure data for a set of peptides and/or glycopeptides into one or more machine-learning model trained to identify a disease indicator. In some embodiments, the method of administering a therapy comprises classifying the sample as having NSCLC or not having NSCLC based upon the disease indicator. In some embodiments, the therapy is administered based upon presence and/or amount of at least one, at least two, at least three, at least four, at least five, at least ten, or at least 15 peptide structures from Table 35 and/or Table 40. In some embodiments, the therapy is administered based upon presence and/or amount of at least one, at least two, at least three, at least four, at least five, at least ten, or at least 15 peptides and/or glycopeptides comprising the amino acid sequence of SEQ ID NOs: 224-296 along with the associated glycan set forth in Table 35. In some embodiments, the presence, absence, and/or amount of one or more peptides and/or glycopeptide is determined by MRM-MS. In some embodiments, the therapy is administered on the basis of the stage of NSCLC. In some embodiments, the therapy is administered on the basis of one or more NSCLC risk factor in combination with the presence, absence, and or amount of one or more peptides or glycopeptides provided herein. In some embodiments, the therapy administered for NSCLC is selected from the group comprising a surgery, a chemotherapeutic therapy, a patient-specific therapy, a targeted immunotherapy, a radiation procedure, a radiofrequency ablation (RFA) procedure, or a combination thereof. In some embodiments, the surgery comprises the removal of one or more parts of the lung. In some embodiments, the platinum-coordinating compound comprises one of cisplatin, carboplatin, and nedaplatin. In some embodiments, the chemotherapeutic comprises docetaxel, paclitaxel, albumin-bound paclitaxel, vinorelbine, gemcitabine, irinotecan, pemetrexed, tegafur/gimeracil/oteracil, etoposide, or a combination thereof. In some embodiments, the chemotherapeutic therapy is a platinum-doublet regimen. In some embodiments, the chemotherapeutic therapy is a platinum-triple regimen. In some embodiments, the targeted immunotherapy comprises one or more antibody directed towards an immune system checkpoint protein including but not limited to PD-1, PD-L1, and CTLA-4. In some embodiments, the therapy for NSCLC comprises a combination of one or more antibody that targets PD-1, PD-L1, and CTLA-4. In some embodiments, the patient-specific therapy comprises one or more patient-specific therapy agent selected based on patient-specific changes in tumor cell gene expression including but not limited to changes in KRAS, EGFR, ALK, ROS1, BRAF, RET, MET, and NTRK genes. In some embodiments, the patient-specific therapy is an inhibitor of an oncogene. In some embodiments, the patient-specific therapy is an inhibitor of one or more of KRAS, EGFR, ALK, ROS1, BRAF, MEK, RET, MET, and NTRK. In some embodiments, the radiation procedure comprises the use of high-energy rays or particles to treat NSCLC. In some embodiments, the brachytherapy comprises the placement of radioactive material in or adjacent to the tumor in the airway (e.g., bronchial tubes).

[0795] In some embodiments, the method comprises administering a therapy to treat NSCLC. In some embodiments, the method of administering a therapy comprises inputting quantification data identified from peptide structure data for a set of peptides into one or more machine-learning model trained to identify a disease indicator. In some embodiments, the set of peptide structures comprising one or more, two or more, three or more, four or more, five or more, 10 or more, 15 or more, or each of the peptides and/or glycopeptides consisting of the amino acid sequence of SEQ ID NOs: 224-257. In some embodiments, the method comprises inputting quantification data from peptide structure data into a machine-learning model, wherein the machine-learning model comprises a model trained using one or more of a first set of peptide structure coefficients set forth in Table 39 for all stages of NSCLC (stages 1-4), a second set of peptide structure coefficients set forth in Table 39 for early-stage NSCLC (stages 1-2), and a third set of peptide structure coefficients set forth in Table 39 for late-stage NSCLC (stages 3-4). In some embodiments, the model is trained using any one of the set of peptide structure coefficients described herein to identify a disease indicator, identifying by the machine-learning model, the disease indicator, and classifying the biological sample with respect to a plurality of states associated with NSCLC based upon the disease indicator. In some embodiments, the disease indicator comprises one or more scores that indicate a probability that the subject falls within one of the states associated with NSCLC (e.g., having NSCLC or not having NSCLC). In some embodiments, the model trained using any one of the first set, the second set, or the third set of peptide structure coefficients is a logical regression model. In some embodiments, the model trained using any one of the first set, the second set, or the third set of peptide structure coefficients comprises a LASSO regression model. In some embodiments, the peptide structures are detected using LC-MS. In some embodiments, the LC-MS comprises LC-MS/MS and LC-MS/MS running in a MRM mode. In some embodiments, the method comprises selecting a treatment for NSCLC based upon the classification described herein. In some embodiments, the method comprises administering a treatment for NSCLC based upon the classification described herein. In some embodiments, the therapy for NSCLC is selected from the group comprising a surgery, a chemotherapeutic therapy, a patient-specific therapy, a targeted immunotherapy, a radiation procedure, a radiofrequency ablation (RFA) procedure, or a combination thereof. In some embodiments, the surgery comprises the removal of one or more parts of the lung. In some embodiments, the therapy comprises a lobectomy, a bronchial sleeve resection, a wedge resection, or a pneumonectomy. In some embodiments, the method comprises classifying a biological sample with respect to a plurality of states associated with NSCLC based upon one or more peptide structures provided in Table 35 or Table 40. In some embodiments, the method comprises inputting quantification data identified from peptide structure data for a set of peptides into one or more machine-learning model trained to identify a disease indicator. In some embodiments, the method comprises classifying the sample as having NSCLC or not having NSCLC based upon the disease indicator. In some embodiments, the peptide structure data comprises one or more peptide structure provided in Table 35 and/or Table 40. In some embodiments, the presence, absence, and/or amount of one or more peptides and/or glycopeptides is determined by MRM-MS. In some embodiments, the method comprises selecting a particular therapy described herein based upon the presence, amount, and/or relative amount of one or more biomarkers comprising the peptide structures provided in Table 35 or Table 40. In some embodiments, the method comprises administering a particular therapy described herein based upon the presence, amount, and/or relative amount of one or more biomarkers comprising the peptide structures provided in Table 35 or Table 40. In some embodiments, the method further comprises selecting a particular therapy described herein based upon the disease indicator and/or classification. In some embodiments, the method further comprises administering a particular therapy described herein based upon the disease indicator and/or classification.

[0796] In some embodiments, the chemotherapeutic therapy comprises a platinum-coordinating compound, a chemotherapeutic, or a combination thereof. In some embodiments, the platinum-coordinating compound comprises one of cisplatin (CDDP), carboplatin (CBDCA), and nedaplatin (CDGP). In some embodiments, the chemotherapeutic comprises docetaxel (Taxotere, DTX), paclitaxel (Taxol, PTX), albumin-bound paclitaxel (nab-paclitaxel, Abraxane), vinorelbine (Navelbine,VNR), gemcitabine (Gemzar, GEM), irinotecan (CPT-11), pemetrexed (Alimta, PEM), tegafur/gimeracil/oteracil (S1), etoposide (VP-16), or a combination thereof. In some embodiments, the chemotherapeutic therapy is a platinum-doublet regimen. In some embodiments, the chemotherapeutic therapy is a platinum-triple regimen. In some embodiments, the method comprises classifying a biological sample with respect to a plurality of states associated with NSCLC based upon one or more peptide structures provided in Table 35 or Table 40. In some embodiments, the method comprises inputting quantification data identified from peptide structure data for a set of peptides and/or glycopeptides into one or more machine-learning model trained to identify a disease indicator. In some embodiments, the method comprises classifying the sample as having NSCLC or not having NSCLC based upon the disease indicator. In some embodiments, the peptide structure data comprises one or more peptide structure provided in Table 35 and/or Table 40. In some embodiments, the presence, absence, and/or amount of one or more peptides and/or glycopeptides is determined by MRM-MS. In some embodiments, the method comprises selecting a particular therapy described herein based upon the presence, amount, and/or relative amount of one or more biomarkers comprising the peptide structures provided in Table 35 or Table 40. In some embodiments, the method comprises selecting a particular therapy described herein based upon the presence, amount, and/or relative amount of one or more biomarkers comprising the glycopeptides provided in Table 35 or Table 40. In some embodiments, the method comprises administering a particular therapy described herein based upon the presence, amount, and/or relative amount of one or more biomarkers comprising the peptide structures provided in Table 35 or Table 40. In some embodiments, the method comprises administering a particular therapy described herein based upon the presence, amount, and/or relative amount of one or more biomarkers comprising the glycopeptides provided in Table 35 or Table 40. In some embodiments, the method further comprises selecting a particular therapy described herein based upon the disease indicator and/or classification. In some embodiments, the method further comprises administering a particular therapy described herein based upon the disease indicator and/or classification.

[0797] In some embodiments, the targeted immunotherapy comprises one or more antibody directed towards an immune system checkpoint protein including but not limited to PD-1, PD-L1, and CTLA-4. In some embodiments, the antibody targeting PD-1 comprises nivolumab (Opdivo), pembrolizumab (Keytruda), and cemiplimab (Libtayo). In some embodiments, the antibody targeting PD-L1 comprises atezolizumab (Tecentriq), durvalumab (Imfinzi), and avelumab (Bavencio). In some embodiments, the antibody targeting CTLA-4 comprises ipilimumab (Yervoy). In some embodiments, the therapy for NSCLC comprises a combination of one or more antibody that targets PD-1, PD-L1, and CTLA-4. In some embodiments, the method comprises classifying a biological sample with respect to a plurality of states associated with NSCLC based upon one or more peptide structures provided in Table 35 or Table 40. In some embodiments, the method comprises classifying a biological sample with respect to a plurality of states associated with NSCLC based upon one or more glycopeptides provided in Table 35 or Table 40. In some embodiments, the method comprises inputting quantification data identified from peptide structure data for a set of peptides and/or glycopeptides into one or more machine-learning model trained to identify a disease indicator. In some embodiments, the method comprises classifying the sample as having NSCLC or not having NSCLC based upon the disease indicator. In some embodiments, the peptide structure data comprises one or more peptide structure provided in Table 35 and/or Table 40. In some embodiments, the presence, absence, and/or amount of one or more peptides and/or glycopeptide is determined by MRM-MS. In some embodiments, the method comprises selecting a particular therapy described herein based upon the presence, amount, and/or relative amount of one or more biomarkers comprising the peptide structures provided in Table 35 or Table 40. In some embodiments, the method comprises selecting a particular therapy described herein based upon the presence, amount, and/or relative amount of one or more biomarkers comprising the glycopeptides provided in Table 35 or Table 40. In some embodiments, the method comprises administering a particular therapy described herein based upon the presence, amount, and/or relative amount of one or more biomarkers comprising the peptide structures provided in Table 35 or Table 40. In some embodiments, the method comprises administering a particular therapy described herein based upon the presence, amount, and/or relative amount of one or more biomarkers comprising the glycopeptides provided in Table 35 or Table 40. In some embodiments, the method further comprises selecting a particular therapy described herein based upon the disease indicator and/or classification. In some embodiments, the method further comprises administering a particular therapy described herein based upon the disease indicator and/or classification.

[0798] In some embodiments, the therapy comprises one or more patient-specific therapy agent selected based on patient-specific changes in tumor cell gene expression including but not limited to changes in KRAS, EGFR, ALK, ROS1, BRAF, RET, MET, and NTRK genes. In some embodiments, the patient-specific therapy is an inhibitor of an oncogene. In some embodiments, the patient-specific therapy is an inhibitor of one or more of KRAS, EGFR, ALK, ROS1, BRAF, MEK, RET, MET, and NTRK. In some embodiments, the patient-specific therapy comprises one or more of sotorasib (Lumakras), erlotinib (Tarceva), afatinib (Gilotrif), gefitinib (Iressa), osimertinib (Tagrisso), dacomitinib (Vizimpro), amivantamab (Rybrevant), nobocertinib (Exkivity), necitumumab (Portrazza), crizotinib (Xalkori), ceritinib (Zykadia), alectinib (Alecensa), brigatinib (Alunbrig), lorlatinib (Lorbrena), entrectinib (Rozlytrek), dabrafenib (Tafinlar), trametinib (Mekinist), selpercatinib (Retevmo), pralsetinib (Gavreto), capmatinib (Tabrecta), tepotinib (Tepmetko), larotrectinib (Vitrakvi), and combinations thereof. In some embodiments the patient-specific therapy comprises an angiogenesis inhibitor. In some embodiments, the angiogenesis inhibitor comprises one of bevacizumab (Avastin, BEV) and ramucirumab (Cyramza, RAM). In some embodiments, the therapy for NSCLC comprises a combination of one or more patient-specific therapy agents. In some embodiments, the method comprises classifying a biological sample with respect to a plurality of states associated with NSCLC based upon one or more peptide structures provided in Table 35 or Table 40. In some embodiments, the method comprises classifying a biological sample with respect to a plurality of states associated with NSCLC based upon one or more glycopeptides provided in Table 35 or Table 40. In some embodiments, the method comprises inputting quantification data identified from peptide structure data for a set of peptides and/or glycopeptides into one or more machine-learning model trained to identify a disease indicator. In some embodiments, the method comprises classifying the sample as having NSCLC or not having NSCLC based upon the disease indicator. In some embodiments, the peptide structure data comprises one or more peptide structure provided in Table 35 and/or Table 40. In some embodiments, the presence, absence, and/or amount of one or more peptides and/or glycopeptide is determined by MRM-MS. In some embodiments, the method comprises selecting a particular therapy described herein based upon the presence, amount, and/or relative amount of one or more biomarkers comprising the peptide structures provided in Table 35 or Table 40. In some embodiments, the method comprises selecting a particular therapy described herein based upon the presence, amount, and/or relative amount of one or more biomarkers comprising the glycopeptides provided in Table 35 or Table 40. In some embodiments, the method comprises administering a particular therapy described herein based upon the presence, amount, and/or relative amount of one or more biomarkers comprising the peptide structures provided in Table 35 or Table 40. In some embodiments, the method comprises administering a particular therapy described herein based upon the presence, amount, and/or relative amount of one or more biomarkers comprising the glycopeptides provided in Table 35 or Table 40. In some embodiments, the method further comprises selecting a particular therapy described herein based upon the disease indicator and/or classification. In some embodiments, the method further comprises administering a particular therapy described herein based upon the disease indicator and/or classification.

[0799] In some embodiments, the radiation procedure comprises the use of high-energy rays or particles to treat NSCLC. In some embodiments, the radiation procedure comprises external beam radiation therapy (EBRT) and internal radiation therapy (also referred to as brachytherapy). In some embodiments, the EBRT comprises one or more of stereotactic ablative radiotherapy (SABR), three-dimensional conformal radiation therapy (3D-CRT), intensity modulated radiation therapy (IMRT), volumetric modulated arc therapy (VMAT), and stereotactic radiosurgery (SRS). In some embodiments, the brachytherapy comprises the placement of radioactive material in or adjacent to the tumor in the airway (e.g., bronchial tubes). In some embodiments, the method comprises classifying a biological sample with respect to a plurality of states associated with NSCLC based upon one or more peptide structures provided in Table 35 or Table 40. In some embodiments, the method comprises classifying a biological sample with respect to a plurality of states associated with NSCLC based upon one or more glycopeptides provided in Table 35 or Table 40. In some embodiments, the method comprises inputting quantification data identified from peptide structure data for a set of peptides and/or glycopeptides into one or more machine-learning model trained to identify a disease indicator. In some embodiments, the method comprises classifying the sample as having NSCLC or not having NSCLC based upon the disease indicator. In some embodiments, the peptide structure data comprises one or more peptide structure provided in Table 35 and/or Table 40. In some embodiments, the presence, absence, and/or amount of one or more peptides and/or glycopeptide is determined by MRM-MS. In some embodiments, the method comprises selecting a particular therapy described herein based upon the presence, amount, and/or relative amount of one or more biomarkers comprising the peptide structures provided in Table 35 or Table 40. In some embodiments, the method comprises selecting a particular therapy described herein based upon the presence, amount, and/or relative amount of one or more biomarkers comprising the glycopeptides provided in Table 35 or Table 40. In some embodiments, the method comprises administering a particular therapy described herein based upon the presence, amount, and/or relative amount of one or more biomarkers comprising the peptide structures provided in Table 35 or Table 40. In some embodiments, the method comprises administering a particular therapy described herein based upon the presence, amount, and/or relative amount of one or more biomarkers comprising the glycopeptides provided in Table 35 or Table 40. In some embodiments, the method further comprises selecting a particular therapy described herein based upon the disease indicator and/or classification. In some embodiments, the method further comprises administering a particular therapy described herein based upon the disease indicator and/or classification.

[0800] In some embodiments, the method involves monitoring of the individual for progression of NSCLC. In some embodiments, the method involving monitoring comprises inputting quantification data identified from peptide structure data for a set of peptides and/or glycopeptides into a machine-learning model trained to identify a disease indicator. In some embodiments, the machine-learning model is a regularized regression model (e.g., LASSO regression model) trained using one or more of a first set, a second set, or a third set of peptide structure coefficients set forth in Table 39. In some embodiments, the first set, the second set, or the third set of peptide structure coefficients used to train the model comprise one or more of the amino acid sequence of SEQ ID NOs: 224-257 as set forth in Table 39. In some embodiments, the method comprises classifying the sample as having NSCLC or not having NSCLC based upon the disease indicator. In some embodiments, the method involving monitoring comprises classifying a subsequent biological sample with respect to a plurality of states associated with NSCLC, based upon one or more peptide structures provided in Table 35 and/or Table 40, and selecting a treatment for NSCLC based upon the classification. In some embodiments, the monitoring comprises classifying a subsequent biological sample with respect to a plurality of states associated with NSCLC based upon one or more peptide structures provided in Table 35 and/or Table 40 and administering a treatment for NSCLC based upon the classification. In some embodiments, the presence, absence, and/or amount of one or more peptides and/or glycopeptide is determined by MRM-MS. In some embodiments, the method involving monitoring comprises inputting quantification data identified from peptide structure data for a set of peptides and/or glycopeptides to identify a disease indicator, detecting the presence of a corresponding state associated with NSCLC in response that the disease indicator falls within a selected range, and diagnosing NSCLC. In some embodiments, the peptide structure data comprises one or more peptide structure provided in Table 35 and/or Table 40. In some embodiments, the peptide structure data comprises one or more glycopeptide structure provided in Table 35 and/or Table 40. In some embodiments, the method involving monitoring further comprises selecting a particular therapy based upon the disease indicator. In some embodiments, the method involving monitoring further comprises administering an effective amount of a therapy for NSCLC.

### VII.C. Patient Populations—NSCLC

[0801] Provided herein is a method of diagnosis and treatment for an individual. Further provided herein is a method of diagnosis and treatment for an individual with one or more risk factors associated with NSCLC. In some embodiments, the method comprises measuring the amount/presence or absence of one or more peptides structures from Table 35 in an individual with one or more risk factors associated with NSCLC. In some embodiments, the method involves diagnosing an individual based upon presence and/or amount of one or more peptide structures from Table 35. In some embodiments, the method involves diagnosing an individual based upon presence and/or amount of one or more glycopeptides from Table 35. In some embodiments, the diagnosis is based upon the presence and/or amount of one or more peptides and/or glycopeptides comprising the amino acid sequence of SEQ ID NOs: 224-296 set forth in Table 35. In some embodiments, the diagnosis is based upon the presence and/or amount of one or more glycopeptides comprising the amino acid sequence of SEQ ID NOs: 224-296 set forth in Table 35. In some embodiments, the diagnosis is based upon the presence and/or amount of one or more glycopeptides consisting of the amino acid sequence of SEQ ID NOs: 224-296 along with the associated glycan set forth in Table 35. In some embodiments, the individual diagnosed with NSCLC is administered one or more NSCLC therapies described herein, based on the disease indicator determined by the diagnosis. In some embodiments, the individual is administered one or more NSCLC therapies described herein, based on the disease indicator determined by the diagnosis. In some embodiments, the individual confirmed to have NSCLC is treated based on the disease indicator determined by the diagnosis.

[0802] In some embodiments, the individual is diagnosed, wherein one or more peptide structures from Table 35 are detected and are distinct from a healthy control sample. In some embodiments, the individual is diagnosed, wherein one or more peptide structures comprising the amino acid sequence of SEQ ID NOs: 224-296 are detected and are distinct from a healthy control sample. In some embodiments, the individual is diagnosed, wherein one or more glycopeptides comprising the amino acid sequence of SEQ ID NOs: 224-296 are detected and are distinct from a healthy control sample. In some embodiments, the amount of at least one peptide structure is none, or below a detection limit. In some embodiments, the amount of at least one glycopeptide structure is none, or below a detection limit. In some embodiments, the amount of at least one peptide structure from Table 35 is none, or below a detection limit. In some embodiments, the amount of at least one peptide structure comprising the amino acid sequence of SEQ ID NOs: 224-296 set forth in Table 35 is none, or below a detection limit. In some embodiments, the amount of at least one peptide structure is significantly lower than a control sample from a healthy individual. In some embodiments, the amount of at least one glycopeptide structure is significantly lower than a control sample from a healthy individual. In some embodiments, the amount of at least one peptide structure from Table 35 is significantly lower than a control sample from a healthy individual. In some embodiments, the amount of at least one peptide structure comprising the amino acid sequence of SEQ ID NOs: 224-296 set forth in Table 35 is significantly lower than a control sample from a healthy individual. In some embodiments, the amount of at least one peptide structure is significantly higher than a control sample from a healthy individual. In some embodiments, the amount of at least one glycopeptide structure is significantly higher than a control sample from a healthy individual. In some embodiments, the amount of at least one peptide structure from Table 35 is significantly higher than a control sample from a healthy individual. In some embodiments, the amount of at least one peptide structure comprising the amino acid sequence of SEQ ID NOs: 224-296 set forth in Table 35 is significantly higher than a control sample from a healthy individual. In some embodiments, the individual is diagnosed and treated according to the presence and/or amount of one or more peptide structures from Table 35. In some embodiments, the individual is diagnosed and treated according to the presence and/or amount of one or more peptide structures comprising the amino acid sequence of SEQ ID NOs: 224-296 along with the associated glycan set forth in Table 35.

[0803] In some embodiments, the individual has NSCLC. In some embodiments, the individual has stage 0, stage I, stage II, stage III, or stage IV NSCLC. In some embodiments, the individual has early-stage NSCLC. In some embodiments, the individual has late-stage NSCLC or advanced NSCLC. In some embodiments, the individual has NSCLC that has not spread from the site of origination. In some embodiments, the individual has NSCLC that has spread locally to the surrounding tissue. In some embodiments, the individual has NSCLC that has spread beyond the original tumor and/or the local tumor environment. In some embodiments, the individual has NSCLC that has spread to one or more organs beyond the lungs. In some embodiments, the individual has metastatic NSCLC. In some embodiments, the individual has NSCLC and has relapsed and/or progressed. In some embodiments, the method comprises classifying a biological sample with respect to a plurality of states associated with NSCLC based upon one or more peptide structures provided in Table 35 or Table 40. In some embodiments, the method comprises classifying a biological sample with respect to a plurality of states associated with NSCLC based upon one or more glycopeptides provided in Table 35 or Table 40. In some embodiments, the method comprises inputting quantification data identified from peptide structure data for a set of peptides and/or glycopeptides into one or more machine-learning model trained to identify a disease indicator. In some embodiments, the method comprises classifying the sample as having NSCLC or not having NSCLC based upon the disease indicator. In some embodiments, the peptide structure data comprises one or more peptide structure provided in Table 35 and/or Table 40. In some embodiments, the presence, absence, and/or amount of one or more peptides and/or glycopeptide is determined by MRM-MS. In some embodiments, the method comprises selecting a particular therapy described herein based upon the presence, amount, and/or relative amount of one or more biomarkers comprising the peptide structures provided in Table 35 or Table 40. In some embodiments, the method comprises selecting a particular therapy described herein based upon the presence, amount, and/or relative amount of one or more biomarkers comprising the glycopeptides provided in Table 35 or Table 40. In some embodiments, the method comprises administering a particular therapy described herein based upon the presence, amount, and/or relative amount of one or more biomarkers comprising the peptide structures provided in Table 35 or Table 40. In some embodiments, the method comprises administering a particular therapy described herein based upon the presence, amount, and/or relative amount of one or more biomarkers comprising the glycopeptides provided in Table 35 or Table 40. In some embodiments, the method further comprises selecting a particular therapy described herein based upon the disease indicator and/or classification. In some embodiments, the method further comprises administering a particular therapy described herein based upon the disease indicator and/or classification.

[0804] In some embodiments, the individual has had prior lines of therapy for treating NSCLC. In some embodiments, the individual has had at least 1, at least 2, or at least 3 prior lines of therapy for treating NSCLC. In some embodiments, the individual has had no more than 1, no more than 2, or no more than 3 prior lines of therapy for treating NSCLC. In some embodiments, the individual has not had prior therapy for treating NSCLC.

[0805] In some embodiments, the individual has altered gene expression relevant for NSCLC treatment. In some embodiments, the individual has altered oncogene expression. In some embodiments, the individual has altered tumor cell gene expression. In some embodiments, the altered gene expression comprises altered gene expression of one or more of KRAS, EGFR, ALK, ROS1, BRAF, RET, MET, and NTRK. In some embodiments, the altered gene expression comprises altered gene expression of one or more immune system checkpoint proteins PD-1, PD-L1, and CTLA-4. In some embodiments, the individual having altered gene expression relevant for NSCLC treatment may benefit from a therapy comprising one or more antibody that targets PD-1, PD-L1, and CTLA-4, or a combination thereof.

[0806] In some embodiments, the individual is at risk of developing NSCLC. In some embodiments, the individual is positive for one or more risk factor that increases the chances of developing NSCLC. In some embodiments, the one or more risk factor is smoking, wherein the individual smokes at least one of cigarettes, cigars, pipes, and other tobacco-based products. In some embodiments, the individual is a smoker. In some embodiments, the individual smoked in the past and has quit smoking. In some embodiments, the individual is or has been a recreational smoker, wherein smoking occurs infrequently. In some embodiments, the individual is a non-smoker and has never smoked before. In some embodiments, the individual is exposed to secondhand smoke. In some embodiments, the individual is exposed to environmental or occupational carcinogens that increase the risk of developing NSCLC. In some embodiments, the environmental or occupational carcinogen comprises one or more of asbestos, arsenic, chromium, beryllium, nickel, soot, tar, indoor air pollution, and outdoor air pollution. In some embodiments, the individual is exposed to radiation that increase the risk of developing NSCLC. In some embodiments, the radiation comprises one or more of radiation therapy for the breast or chest, extensive CT scan imaging, and radon exposure. In some embodiments, the individual has a family history of lung cancer that increase the risk of developing NSCLC. In some embodiments, the individual is aging, wherein the individual is at least 40 years old. In some embodiments, the individual has at least 1, at least 2, at least 3, at least 4, at least 5, or at least 6 risk factors for NSCLC.

[0807] In some embodiments, the individual is at least 18 years old. In some embodiments, the individual is at least 20, at least 25, at least 30, at least 35, at least 40, at least 45, at least 50, at least 55, at least 60, at least 65, at least 70, at least 75, at least 80, at least 85, or at least 90 years old. In some embodiments, the individual is at least 65 years old.

[0808] In some embodiments, the individual is positive for one or more disease features of NSCLC. In some embodiments, the one or more disease features of NSCLC comprise a new cough, a worsening cough, a persistent cough, a cough that produces blood (e.g., hemoptysis), shortness of breath, a persistent chest infection (e.g., bronchitis, pneumonia), wheezing, chest pain, voice hoarseness, a headache, facial swelling, body swelling, upper body pain, weakness of the hand, a droopy eyelid, blurred vision, unexplained weight loss, tiredness, fatigue, persistent or worsening bone pain, and persistent or worsening joint pain. In some embodiments, the individual has at least 1, at least 2, at least 3, at least 4, at least 5, or at least 6 disease features of NSCLC. In some embodiments, the individual has any combination of disease features of NSCLC described herein.

### VII.D. Methods of Treating Ovarian Cancer

[0809] In one or more embodiments, the final output generated in step 506 in FIG. 47 or in step 606 in FIG. 48A may include a treatment output. The treatment output may identify one or more treatment types for a subject based on the disease indicator and/or diagnosis output generated via process 500 in FIG. 47 or process 600 in FIG. 48A, respectively. Treatment for ovarian cancer (e.g., EOC) may include, for example, but is not limited to, at least one of surgery, radiation therapy, a targeted drug therapy (e.g., one or more targeted therapeutic agents), chemotherapy (e.g., one or more chemotherapeutic agents), immunotherapy (e.g., one or more immunotherapeutic agents), hormone therapy, neoadjuvant therapy, or some other form of treatment. The treatment output may include, for example, a treatment plan. The treatment plan may include, for example, but is not limited to, a timeline or schedule for administering the treatment, dosing information, other treatment-related information, or a combination thereof. Being able to accurately predict malignancy via the process 500 in FIG. 47 and/or the process 600 in FIG. 48A may allow treatment for malignant pelvic tumors (e.g., EOC) to be started earlier without requiring, in many or most cases, further invasive testing such as a biopsy.

[0810] In one or more embodiments, a patient biological sample is obtained from a subject. The biological sample may be processed (e.g., via digestion and fragmentation) such that one or more peptide structures of interest are detected. For example, detection and quantification may be performed for one or more peptide structures from Table 41, Table 42, Table 43A, Table 43B, Table 43C, and/or Table 43D. The quantification data that is generated for these peptide structures may be input into a trained binary classification model to generate a disease indicator, which may be, for example, a probability score. A determination may be made as to whether the disease indicator (e.g., score) is above or below a selected threshold (e.g., 0.5). If the disease indicator is above the selected threshold, the biological sample may be classified as evidencing malignant pelvic tumor.

[0811] Further, this classification may further include a classification that the subject is in need of treatment. If the subject is in need of treatment based on the classification, treatment is administered. For example, a therapeutically effective amount of a therapeutic agent is administered to the patient, where the therapeutic agent is selected from a chemotherapeutic agent, an immunotherapeutic agent, a hormone therapy, a targeted therapeutic agent, a neoadjuvant therapy, or a combination.

### I.A. Exemplary Methodologies for Analyzing Peptide Structure Data and Managing Melanoma Treatment

### I.A.1. Predicting Treatment Response

[0812] FIG. 64 is a flowchart of a process for managing a treatment for a subject diagnosed with a melanoma condition in accordance with one or more embodiments. Process 500 may be implemented using, for example, at least a portion of workflow 100 as described in FIGS. 1, 2A, and 2B and/or analysis system 300 as described in FIG. 3. Process 500 may be used to generate, for example, a treatment output such as treatment output 334 in FIG. 3 to aid in the treatment of a subject diagnosed with a melanoma condition (e.g., malignant melanoma).

[0813] Step 502 includes receiving peptide structure data corresponding to a set of glycoproteins in a biological sample obtained from the subject. The peptide structure data may be, for example, one example of an implementation of peptide structure data 310 in FIG. 3. The peptide structure data may have been generated using multiple reaction monitoring mass spectrometry. The peptide structure data may include quantification data for each peptide structure of a plurality of peptide structures. The quantification data may include, for example, one or more quantification metrics for each peptide structure of the plurality of peptide structures. A quantification metric for a peptide structure may include, for example, but is not limited to, at least one of a relative abundance, an absolute abundance, an adjusted abundance, a normalized abundance, a relative quantity, an adjusted quantity, a normalized quantity, a relative concentration, an adjusted concentration, or a normalized concentration. In this manner, the quantification data for a given peptide structure provides an indication of the abundance of the peptide structure in the biological sample.

[0814] Step 504 includes computing a treatment score using quantification data identified from the peptide structure data for a set of peptide structures, wherein the set of peptide structures includes at least one peptide structure identified from a plurality of peptide structures listed in Table 55. In step 504, the set of peptide structures may include, for example, at least two peptide structures from a selected group of peptide structures identified in Table 55 below. The selected group of peptide structures may be, for example, a portion of the peptide structure identified in Table 55. The selected group of peptide structures may be, for example, those peptide structures identified in Table 56 below or those peptide structures identified in Table 57 below. For example, when the treatment being considered includes pembrolizumab, the selected group of peptide structures includes the peptide structures listed in Table 56. When the treatment being considered includes a combination of nivolumab and ipilimumab, the selected group of peptide structures includes the peptide structures listed in Table 57. In step 504, the set of peptide structures may include at least one glycopeptide structure defined by a peptide sequence and a glycan structure linked to a linking site of the peptide sequence, as identified in Table 55.

[0815] In one or more embodiments, the set of peptide structures may have been identified using sample data for a sample population (e.g., subjects diagnosed with melanoma in which at least a portion of the subjects have been treated using the treatment being considered in process 500) and a statistical algorithm that identifies a relative significance for each peptide structure of a collection of peptide structures corresponding to the sample data. The statistical algorithm may include, for example, a Wilcoxon rank-sum test. In one or more embodiments, the identification of the set of peptide structures is performed using process 800 described below in FIG. 8.

[0816] Step 504 may be performed by, for example, computing a proportion of the set of peptide structures having a certain type of abundance (e.g., relative abundance for glycopeptide structures and absolute abundance for aglycosylated peptide structures) greater than a reference abundance as the treatment score. In one or more embodiments, the reference abundance for a given peptide structure may be, for example, a median abundance of a plurality of abundances for that peptide structure across a sample population (e.g., as identified during training). The relative abundance for a given peptide structure is the abundance of that peptide structure relative to the corresponding aglycosylated peptide structure (e.g., the peptide structure having the same peptide sequence but without a glycan structure being bound to the peptide sequence).

[0817] Step 506 includes generating a treatment output that indicates a predicted response to the treatment for the subject using the treatment score. The treatment output may be one example of an implementation for treatment output 334 in FIG. 3. In one or more embodiments, step 506 may be performed by generating the predicted response to the treatment based on whether the treatment score is above a selected threshold. The selected threshold may be, for example, 0.5. For example, step 506 may include identifying a first predicted response classification for the subject when the treatment score is above 0.5 or identifying a second predicted response classification for the subject when the treatment score is not above 0. The first predicted response classification may be “sustained control” and the second predicted response classification may be “early disruption.” Sustained control may indicate that an absence of disruption events is predicted during a sustained period of time (e.g., 6 months) after treatment administration. Early disruption may indicate that a presence of at least one disruption event is predicted during an initial period of time (e.g., 12 months) after treatment.

[0818] The treatment outcome may include, for example, a recommendation to modify a treatment plan for the subject. For example, in some cases, the treatment output may indicate that early disruption is predicted for the subject. Accordingly, it may be desirable to modify the treatment plan. For example, the recommendation for modifying the treatment plan may include at least one of selecting a different treatment for the subject, alter (e.g., increase/decrease) a dosage for the treatment, or combining the treatment with at least one other treatment.

[0819] In one or more embodiments, the treatment output includes at least one of a design for the treatment or a therapeutic dosage for the treatment. For example, in some cases when the treatment score indicates that the subject will respond well (e.g., sustained control) to the treatment, the treatment outcome may identify the therapeutic dosage for the treatment. In this manner, a medical professional that receives the treatment output at a remote system (e.g., phone, tablet, laptop, etc.) may be able to more quickly administer the treatment to the subject.

[0820] In one or more embodiments, process 500 may optionally include step 508. Step 508 may include administering a therapeutic dosage of the treatment based on the treatment output to the subject. For example, the treatment may be administered (e.g., via intravenous or oral administration) based on the predicted response being a predicted response classification that indicates the treatment will be successful. For example, a predicted response classification of “sustained control” may indicate that the subject is predicted to respond well to treatment.

TABLE 55
Peptide Structures associated with Melanoma Treatments

| | | | | Mono- | Linking | Linking | |
|---|---|---|---|---|---|---|---|
| | Peptide | (Protein) | (Peptide) | isotopic | Site Pos. | Site Pos. | Glycan |
| PS-ID | Structure (PS) | SEQ ID | SEQ ID | mass | in Protein | in Peptide | Structure |
| NO. | NAME | NO. | NO. | (Da) | Sequence | Sequence | GL NO. |
| 330 | IGG1_297_5400 | 450 | 594 | 2811.09 | 180 | 5 | 5400 |
| 331 | IGG2_297_5411 | 451 | 595 | 3216.25 | 176 | 5 | 5411 |
| 332 | IGG1_297_5510 | 450 | 594 | 3160.22 | 180 | 5 | 5510 |
| 333 | IGG2_297_5410 | 451 | 595 | 2925.15 | 176 | 5 | 5410 |
| 334 | IGG1_297_5410 | 450 | 594 | 2957.14 | 180 | 5 | 5410 |
| 335 | IGG2_297_4411 | 451 | 595 | 3054.20 | 176 | 5 | 4411 |
| 336 | THBG_36_5402 | 452 | 593 | 3880.57 | 36 | 10 | 5402 |
| 337 | IGG2_297_5510 | 451 | 595 | 3128.23 | 176 | 5 | 5510 |
| 338 | AGP1_33_6503 | 453 | 570 | 5436.40 | 33 | 15 | 6503 |
| 339 | CO8B_243_6610 | 454 | 571 | 4231.67 | 243 | 11 | 6610 |
| 340 | IGA12_144_5502 | 455, 469 | 572 | 5370.44 | 144 | 18 | 5502 |
| 341 | KLKB1_494_5410 | 456 | 573 | 4014.82 | 494 | 6 | 5410 |
| 342 | IGG1_297_4400 | 450 | 594 | 2649.03 | 180 | 5 | 4400 |
| 343 | AACT_271_7602 | 457 | 574 | 4686.91 | 271 | 4 | 7602 |
| 344 | CO8B_553_5410 | 454 | 575 | 3454.29 | 553 | 6 | 5410 |
| 345 | FETUA_156_5402.5421 | 458 | 576 | 3975.61 | 156 | 12 | 5402 |
| 346 | IGA12_144_5501 | 455, 469 | 572 | 5079.35 | 144 | 18 | 5501 |
| 347 | IGG2_297_4500 | 451 | 595 | 2820.12 | 176 | 5 | 4500 |
| 348 | AGP1_33_6502 | 453 | 570 | 5145.31 | 33 | 15 | 6502 |
| 349 | CLUS_374_6520.6501 | 459 | 577 | 3961.64 | 374 | 3 | 6501 |
| 350 | A2MG_869_5200 | 460 | 578 | 4629.04 | 869 | 6 | 5200 |
| 351 | CFAH_882_5420.5401 | 461 | 579 | 3933.66 | 882 | 15 | 5401 |
| 352 | CFAH_911_5420.5401 | 461 | 580 | 3474.32 | 911 | 5 | 5401 |
| 353 | HEMO_453_5420.5401 | 462 | 581 | 3648.55 | 453 | 7 | 5401 |
| 354 | IGG34_297_4410 | 463, 468 | 582 | 2779.10 | 227 (IGG3)/ | 5 | 4410 |
| | | | | | 177 (IGG4) | | |
| 355 | KLKB1_127_5410 | 456 | 583 | 4014.82 | 127 | 5 | 5410 |
| 356 | TRFE_432_5401 | 464 | 584 | 3389.42 | 432 | 12 | 5401 |
| 357 | QUANTPEP.IGG4 | 468 | 585 | 1900.92 | N/A | N/A | N/A |
| | TTPPVLDSDGS | | | | | | |
| | FFL_YSR | | | | | | |
| 358 | NEWQUANTPEP- | 463 | 586 | 2413.15 | N/A | N/A | N/A |
| | IGG3_TPEVTCV | | | | | | |
| | VVDVSHEDPEV | | | | | | |
| | QFK | | | | | | |
| 359 | A2MG_869_6200 | 460 | 578 | 4791.10 | 869 | 6 | 6200 |
| 360 | HPT_184_5511 | 465 | 587 | 4941.20 | 184 | 6 | 5511 |
| 361 | VTNC_169_5401 | 466 | 588 | 2824.14 | 169 | 1 | 5401 |
| 362 | AACT_271_7603 | 457 | 574 | 4978.01 | 271 | 4 | 7603 |
| 363 | HPT_207_10803 | 465 | 589 | 5576.18 | 207 & 211 | 5 & 9 | 5401 & |
| | | | | | | | 5402 |
| 364 | HPT_241_5401.5420 | 465 | 590 | 3707.68 | 241 | 6 | 5401 |
| 365 | IGG34_297_4411 | 463, 468 | 582 | 3070.19 | 227 (IGG3)/ | 5 | 4411 |
| | | | | | 177 (IGG4) | | |
| 366 | ITIH4_517_5420.5401 | 467 | 591 | 4722.02 | 517 | 5 | 5401 |
| 367 | AACT_127_5401 | 457 | 592 | 4125.73 | 127 | 3 | 5401 |

TABLE 56
Peptide Structures associated with a First Treatment (e.g., Pembrolizumab Tx)

| | Peptide | | | Mono- | Linking | Linking | |
|---|---|---|---|---|---|---|---|
| | Structure | (Protein) | (Peptide) | isotopic | Site Pos. | Site Pos. | Glycan |
| PS-ID | (PS) | SEQ ID | SEQ ID | mass | in Protein | in Peptide | Structure |
| NO. | NAME | NO. | NO. | (Da) | Sequence | Sequence | GL NO. |
| 330 | IGG1_297_5400 | 450 | 594 | 2811.09 | 180 | 5 | 5400 |
| 331 | IGG2_297_5411 | 451 | 595 | 3216.25 | 176 | 5 | 5411 |
| 332 | IGG1_297_5510 | 450 | 594 | 3160.22 | 180 | 5 | 5510 |
| 333 | IGG2_297_5410 | 451 | 595 | 2925.15 | 176 | 5 | 5410 |
| 334 | IGG1_297_5410 | 450 | 594 | 2957.14 | 180 | 5 | 5410 |
| 335 | IGG2_297_4411 | 451 | 595 | 3054.20 | 176 | 5 | 4411 |
| 336 | THBG_36_5402 | 452 | 593 | 3880.57 | 36 | 10 | 5402 |
| 337 | IGG2_297_5510 | 451 | 595 | 3128.23 | 176 | 5 | 5510 |
| 338 | AGP1_33_6503 | 453 | 570 | 5436.40 | 33 | 15 | 6503 |
| 339 | CO8B_243_6610 | 454 | 571 | 4231.67 | 243 | 11 | 6610 |
| 340 | IGA12_144_5502 | 455, 469 | 572 | 5370.44 | 144 | 18 | 5502 |
| 341 | KLKB1_494_5410 | 456 | 573 | 4014.82 | 494 | 6 | 5410 |
| 342 | IGG1_297_4400 | 450 | 594 | 2649.03 | 180 | 5 | 4400 |
| 343 | AACT_271_7602 | 457 | 574 | 4686.91 | 271 | 4 | 7602 |
| 344 | CO8B_553_5410 | 454 | 575 | 3454.29 | 553 | 6 | 5410 |
| 345 | FETUA_156_5402.5421 | 458 | 576 | 3975.61 | 156 | 12 | 5402 |
| 346 | IGA12_144_5501 | 455, 469 | 572 | 5079.35 | 144 | 18 | 5501 |
| 347 | IGG2_297_4500 | 451 | 595 | 2820.12 | 176 | 5 | 4500 |
| 348 | AGP1_33_6502 | 453 | 570 | 5145.31 | 33 | 15 | 6502 |
| 349 | CLUS_374_6520.6501 | 459 | 577 | 3961.64 | 374 | 3 | 6501 |

TABLE 57
Peptide Structures associated with a Second treatment
(e.g., Ipilimumab/Nivolumab Tx)

| | | | | Mono- | Linking | Linking | |
|---|---|---|---|---|---|---|---|
| | | (Protein) | (Peptide) | isotopic | Site Pos. | Site Pos. | Glycan |
| PS-ID | Peptide Structure | SEQ ID | SEQ ID | mass | in Protein | in Peptide | Structure |
| NO. | (PS) NAME | NO. | NO. | (Da) | Sequence | Sequence | GL NO. |
| 350 | A2MG_869_5200 | 460 | 578 | 4629.04 | 869 | 6 | 5200 |
| 338 | AGP1_33_6503 | 453 | 570 | 5436.40 | 33 | 15 | 6503 |
| 351 | CFAH_882_5420.5401 | 461 | 579 | 3933.66 | 882 | 15 | 5401 |
| 352 | CFAH_911_5420.5401 | 461 | 580 | 3474.32 | 911 | 5 | 5401 |
| 353 | HEMO_453_5420.5401 | 462 | 581 | 3648.55 | 453 | 7 | 5401 |
| 354 | IGG34_297_4410 | 463, 468 | 582 | 2779.10 | 227 (IGG3)/ | 5 | 4410 |
| | | | | | 177 (IGG4) | | |
| 355 | KLKB1_127_5410 | 456 | 583 | 4014.82 | 127 | 5 | 5410 |
| 356 | TRFE_432_5401 | 464 | 584 | 3389.42 | 432 | 12 | 5401 |
| 357 | QUANTPEP.IGG4 | 468 | 585 | 1900.92 | N/A | N/A | N/A |
| | TTPPVLDSDGSFF | | | | | | |
| | LYSR | | | | | | |
| 358 | NEWQUANTPEP- | 463 | 586 | 2413.15 | N/A | N/A | N/A |
| | IGG3_TPEVTCVV | | | | | | |
| | VDVSHEDPEVQFK | | | | | | |
| 359 | A2MG_869_6200 | 460 | 578 | 4791.10 | 869 | 6 | 6200 |
| 360 | HPT_184_5511 | 465 | 587 | 4941.20 | 184 | 6 | 5511 |
| 361 | VTNC_169_5401 | 466 | 588 | 2824.14 | 169 | 1 | 5401 |
| 362 | AACT_271_7603 | 457 | 574 | 4978.01 | 271 | 4 | 7603 |
| 363 | HPT_207_10803 | 465 | 589 | 5576.18 | 207 & 211 | 5 & 9 | 5401 & |
| | | | | | | | 5402 |
| 364 | HPT_241_5401.5420 | 465 | 590 | 3707.68 | 241 | 6 | 5401 |
| 365 | IGG34_297_4411 | 463, 468 | 582 | 3070.19 | 227 (IGG3)/ | 5 | 4411 |
| | | | | | 177 (IGG4) | | |
| 366 | ITIH4_517_5420.5401 | 467 | 591 | 4722.02 | 517 | 5 | 5401 |
| 341 | KLKB1_494_5410 | 456 | 573 | 4014.82 | 494 | 6 | 5410 |
| 367 | AACT_127_5401 | 457 | 592 | 4125.73 | 127 | 3 | 5401 |

TABLE 58A.1
Peptide Structures associated with Progression of Disease (NSCLC)

| | | | | Mono- | Linking | Linking | |
|---|---|---|---|---|---|---|---|
| PS- | Peptide | Protein | | isotopic | Site Pos. | Site Pos. | Glycan |
| ID | Structure (PS) | UniProt | Peptide | mass | in Protein | in Peptide | Structure |
| NO. | NAME | ID | Sequence | (Da) | Sequence | Sequence | GL NO. |
| 368 | VTNC_242_6502 | P04004 | NISDGFDGIP | 5341.2196 | 242 | 1 | 6502 |
| | | | DNVDAALAL | | | | |
| | | | PAHSYSGR | | | | |
| 369 | THRB_416MC_5402 | P00734 | WVLTAAHCL | 5375.373484 | 416 | 17 | 5402 |
| | | | LYPPWDKNF | | | | |
| | | | TENDLLVR | | | | |
| 370 | QUANTPEP.AACT_ | P01011 | ADLSGITGAR | 959.503584 | N/A | N/A | N/A |
| | ADLSGITGAR | | | | | | |
| 371 | QUANTPEP.I | P05155 | GVTSVSQIFHS | 1825.968604 | N/A | N/A | N/A |
| | C1_GVTSVSQ | | PDLAIR | | | | |
| | IFHSPDLAIR | | | | | | |
| 372 | HPT_241_6511 | P00738 | VVLHPNYSQ | 4218.871006 | 241 | 6 | 6511 |
| | | | VDIGLIK | | | | |
| 373 | VTNC_169_6301 | P04004 | NGSLFAFR | 2783.116514 | 169 | 1 | 6301 |
| 374 | ITIHI_653_1102 | P19827 | TFVLSALQPS | 3104.4044 | 653 | 12 | 1102 |
| | | | PTHSSSNTQR | | | | |
| 375 | FETUA_176_6513 | P02765 | AALAAFNAQ | 5371.203674 | 176 | 11 | 6513 |
| | | | NNGSNFQLE | | | | |
| | | | EISR | | | | |
| 376 | A1AT_70_5402 | P01009 | QLAHQSNST | 5385.40009 | 70 | 7 | 5402 |
| | | | NIFFSPVSIAT | | | | |
| | | | AFAMLSLGT | | | | |
| | | | K | | | | |
| 377 | QUANTPEP.C | P13671 | IGESIELTCPK | 1245.62746 | N/A | N/A | N/A |
| | 06_IGESIELT | | | | | | |
| | CPK | | | | | | |
| 378 | IGM_46_6311 | P01871 | YKNNSDISST | 3302.3189 | 46 | 3 | 6311 |
| | | | R | | | | |
| 379 | APOM_135_5402 | 095445 | TELFSSSCPG | 4735.914404 | 135 | 15 | 5402 |
| | | | GIMLNETGQ | | | | |
| | | | GYQR | | | | |
| 380 | IC1_238_5412 | P05155 | DTFVNASR | 3259.26547 | 238 | 6 | 5412 |
| 381 | NEWQUANTP | P01860 | TPEVTCVVV | 2413.147086 | N/A | N/A | N/A |
| | EP.IGG3_TPE | | DVSHEDPEV | | | | |
| | VTCVVVDVS | | QFK | | | | |
| | HEDPEVQFK | | | | | | |
| 382 | A1AT_70_NO | P01009 | QLAHQSNST | 3180.627698 | N/A | N/A | N/A |
| | NGLYCOSYL | | NIFFSPVSIAT | | | | |
| | ATED | | AFAMLSLGT | | | | |
| | | | K | | | | |
| 383 | HPT_184_5402 | P00738 | MVSHHNLTT | 4883.15735 | 184 | 6 | 5402 |
| | | | GATLINEQW | | | | |
| | | | LLTTAK | | | | |
| 384 | QUANTPEP.C05_ | P01031 | GIYGTISR | 865.465746 | N/A | N/A | N/A |
| | GIYGTISR | | | | | | |
| 385 | KNG1_205_5402 | P01042 | ITYSIVQTNC | 3617.469324 | 205 | 9 | 5402 |
| | | | SK | | | | |
| 386 | IGG2_297_3310 | P01859 | EEQFNSTFR | 2397.969344 | 176 | 5 | 3310 |
| 387 | IGM_209_5500 | P01871 | GLTFQQNAS | 4163.729062 | 209 | 7 | 5500 |
| | | | SMCVPDQDT | | | | |
| | | | AIR | | | | |

TABLE 58A.2
PS-ID NO., Protein Sequence ID NO., and Peptide Sequence ID No. of the
Peptide Structures associated with Progression of Disease (NSCLC)

| PS- | | Protein | |
|---|---|---|---|
| ID | | SEQ ID | Peptide SEQ |
| NO. | Peptide Structure (PS) NAME | NO | ID NO |
| 368 | VTNC_242_6502 | 593 | 613 |
| 369 | THRB_416MC_5402 | 594 | 614 |
| 370 | QUANTPEP.AACT_ADLSGITGAR | 595 | 615 |
| 371 | QUANTPEP.ICI_GVTSVSQIFH | 596 | 616 |
| | SPDLAIR | | |
| 372 | HPT_241_6511 | 597 | 617 |
| 373 | VTNC_169_6301 | 598 | 618 |
| 374 | ITIH1_653_1102 | 599 | 619 |
| 375 | FETUA_176_6513 | 600 | 620 |
| 376 | A1AT_70_5402 | 601 | 621 |
| 377 | QUANTPEP.CO6_IGESIELTCPK | 602 | 622 |
| 378 | IGM_46_6311 | 603 | 623 |
| 379 | APOM_135_5402 | 604 | 624 |
| 380 | IC1_238_5412 | 605 | 625 |
| 381 | NEWQUANTPEP.IGG3_TPEVT | 606 | 626 |
| | CVVVDVSHEDPEVQFK | | |
| 382 | ALAT_70_NONGLYCOSYLATED | 607 | 627 |
| 383 | HPT_184_5402 | 608 | 628 |
| 384 | QUANTPEP.CO5_GIYGTISR | 609 | 629 |
| 385 | KNG1_205_5402 | 610 | 630 |
| 386 | IGG2_297_3310 | 611 | 631 |
| 387 | IGM_209_5500 | 612 | 632 |

TABLE 58B.1
Peptide Structures associated with Death (NSCLC)

| | | | | Mono- | Linking | Linking | |
|---|---|---|---|---|---|---|---|
| | | (Protein) | | isotopic | Site Pos. | Site Pos. | Glycan |
| PS-ID | Peptide Structure | UniProt | Peptide | mass | in Protein | in Peptide | Structure |
| NO. | (PS) NAME | ID | Sequence | (Da) | Sequence | Sequence | GL NO. |
| 388 | QUANTPEP.AAC | P01011 | ADLSGI | 959.503584 | N/A | N/A | N/A |
| | T_ADLSGITGAR | | TGAR | | | | |
| 389 | APOM_135_5402 | 095445 | TELFSS | 4735.914404 | 135 | 15 | 5402 |
| | | | SCPGGI | | | | |
| | | | MLNET | | | | |
| | | | GQGYQ | | | | |
| | | | R | | | | |
| 390 | PEP.AGP1_YVG | P02763 | YVGGQ | 1751.947084 | N/A | N/A | N/A |
| | GQEHFAHLLIL | | EHFAH | | | | |
| | R | | LLILR | | | | |
| 391 | IC1_238_5412 | P05155 | DTFVN | 3259.26547 | 238 | 6 | 5412 |
| | | | ASR | | | | |
| 392 | PEP.AGP12_TED | P02763 | TEDTIF | 993.513088 | N/A | N/A | N/A |
| | TIFLR | or | LR | | | | |
| | | P19652 | | | | | |
| 393 | QUANTPEP.CO5 | P01031 | GIYGTI | 865.465746 | N/A | N/A | N/A |
| | GIYGTISR | | SR | | | | |
| 394 | FETUA_176_6502 | P02765 | AALAA | 4934.050358 | 176 | 11 | 6502 |
| | | | FNAQN | | | | |
| | | | NGSNF | | | | |
| | | | QLEEIS | | | | |
| | | | R | | | | |
| 395 | FETUA_176_6513 | P02765 | AALAA | 5371.203674 | 176 | 11 | 6513 |
| | | | FNAQN | | | | |
| | | | NGSNF | | | | |
| | | | QLEEIS | | | | |
| | | | R | | | | |
| 396 | QUANTPEP.CO6 | P13671 | IGESIEL | 1245.62746 | N/A | N/A | N/A |
| | IGESIELTCPK | | TCPK | | | | |
| 397 | HPT_241_6511 | P00738 | VVLHP | 4218.871006 | 241 | 6 | 6511 |
| | | | NYSQV | | | | |
| | | | DIGLIK | | | | |
| 398 | APOB_3895_5401 | P04114 | FEVDSP | 3826.597634 | 3895 | 9 | 5401 |
| | | | VYNAT | | | | |
| | | | WSASL | | | | |
| | | | K | | | | |
| 399 | QUANTPEP.HPT | P00738 | ILGGHL | 922.523594 | N/A | N/A | N/A |
| | ILGGHLDAK | | DAK | | | | |
| 400 | HPT_184_5402 | P00738 | MVSHH | 4883.15735 | 184 | 6 | 5402 |
| | | | NLTTG | | | | |
| | | | ATLINE | | | | |
| | | | QWLLT | | | | |
| | | | TAK | | | | |
| 401 | ALAT_70_NONG | P01009 | QLAHQ | 3180.627698 | N/A | N/A | N/A |
| | LYCOSYLATED | | SNSTNI | | | | |
| | | | FFSPVSI | | | | |
| | | | ATAFA | | | | |
| | | | MLSLG | | | | |
| | | | TK | | | | |
| 402 | IGM_439_6200 | P01871 | STGKPT | 3742.57335 | 440 | 9 | 6200 |
| | | | LYNVS | | | | |
| | | | LVMSD | | | | |
| | | | TAGTC | | | | |
| | | | Y | | | | |
| 403 | QUANTPEP.IC1 | P05155 | GVTSVS | 1825.968604 | N/A | N/A | N/A |
| | GVTSVSQIFHSP | | QIFHSP | | | | |
| | DLAIR | | DLAIR | | | | |
| 404 | APOH_162_5412 | P02749 | VYKPS | 3818.57729 | 162 | 8 | 5412 |
| | | | AGNNS | | | | |
| | | | LYR | | | | |
| 405 | FETUA_176_6501 | P02765 | AALAA | 4642.954948 | 176 | 11 | 6501 |
| | | | FNAQN | | | | |
| | | | NGSNF | | | | |
| | | | QLEEIS | | | | |
| | | | R | | | | |
| 406 | KLKB1_127_5402 | P03952 | GVNFN | 3068.222488 | 127 | 5 | 5402 |
| | | | VSK | | | | |
| 407 | VTNC_169_6301 | P04004 | NGSLFA | 2783.116514 | 169 | 1 | 6301 |
| | | | FR | | | | |

TABLE 58B.2
PS-ID NO., Protein Sequence ID NO., and Peptide Sequence ID No.
of the Peptide Structures associated with Death (NSCLC)

| | | Protein | Peptide |
|---|---|---|---|
| PS-ID | | SEQ ID | SEQ ID |
| NO. | Peptide Structure (PS) NAME | NO | NO |
| 388 | QUANTPEP.AACT_ADLSGITGAR | 633 | 653 |
| 389 | APOM_135_5402 | 634 | 654 |
| 390 | PEP.AGP1_YVGGQEHFAHLLILR | 635 | 655 |
| 391 | IC1_238_5412 | 636 | 656 |
| 392 | PEP.AGP12_TEDTIFLR | 635 or | 657 |
| | | 637 | |
| 393 | QUANTPEP.CO5_GIYGTISR | 638 | 658 |
| 394 | FETUA_176_6502 | 639 | 659 |
| 395 | FETUA_176_6513 | 640 | 660 |
| 396 | QUANTPEP.CO6_IGESIELTCPK | 641 | 661 |
| 397 | HPT_241_6511 | 642 | 662 |
| 398 | APOB_3895_5401 | 643 | 663 |
| 399 | QUANTPEP.HPT_ILGGHLDAK | 644 | 664 |
| 400 | HPT_184_5402 | 645 | 665 |
| 401 | A1AT_70_NONGLYCOSYLATED | 646 | 666 |
| 402 | IGM_439_6200 | 647 | 667 |
| 403 | QUANTPEP.ICI_GVTSVSQIFHSPDLAIR | 648 | 668 |
| 404 | APOH_162_5412 | 649 | 669 |
| 405 | FETUA_176_6501 | 650 | 670 |
| 406 | KLKB1_127_5402 | 651 | 671 |
| 407 | VTNC_169_6301 | 652 | 672 |

### I.A.2. Selecting Between Multiple Treatments

[0821] FIG. 65 is a flowchart of a process for treatment management of a subject diagnosed with a melanoma condition in accordance with various embodiments. Process 600 may be implemented using, for example, at least a portion of workflow 100 as described in FIGS. 1, 2A, and 2B and/or analysis system 300 as described in FIG. 3. In some embodiments, process 600 may be one example that includes and expands upon process 500 in FIG. 64.

[0822] Step 602 may include receiving peptide structure data corresponding to a set of peptide structures associated with a set of glycoproteins in a biological sample obtained from the subject. Step 602 may be performed in a manner similar to step 502 as described above with respect to FIG. 64.

[0823] Step 604 may include computing a plurality of treatment scores using quantification data identified from the peptide structure data for a plurality of subsets of the set of peptide structures, wherein each treatment score of the plurality of treatment scores corresponds to a different treatment of a plurality of treatments. Each subset of the plurality of subsets may include at least one peptide structure identified from a plurality of peptide structures listed in Table 55. Computing a treatment score of the plurality of treatment scores may be performed in a manner similar to step 504 as described above with respect to FIG. 64. Each treatment score may be computed using, for example, a proportion of a subset of the plurality of subsets of the set of peptide structures having a selected abundance (e.g., relative abundance for glycopeptide structures and absolute abundance for aglycosylated peptide structures) greater than a reference abundance for that peptide structure as a treatment score of the plurality of treatment scores.

[0824] In one or more embodiments, the plurality of subsets includes a first subset and a second subset. For example, step 604 may include computing a first treatment score for a first treatment of using a first portion of the quantification data identified from the peptide structure data for a first subset of the plurality of subsets of the set of peptide structures. Step 604 may further include computing a second treatment score for the second treatment using a second portion of the quantification data identified from the peptide structure data for a second subset of the plurality of subsets of the set of peptide structures. The first subset may include one or more peptide structures from those listed in Table 56. The second subset may include one or more peptide structures from those listed in Table 57.

[0825] In one or more embodiments, a subset of the plurality of subsets may have been previously identified using sample data for a sample population (e.g., subjects diagnosed with melanoma, in which at least a portion of the sample population has been treated with the plurality of treatments) and a statistical algorithm that identifies a relative significance for each peptide structure of a collection of peptide structures corresponding to the sample data with respect to a response to a selected treatment of the plurality of treatments. For example, identifying the subset may include performing a differential abundance analysis using the sample data to compare a first portion of the sample data corresponding to a first response classification (e.g., a positive response classification such as, for example, sustained control) for the selected treatment and a second portion of the sample data corresponding to a second response classification (e.g., a negative response classification such as, for example, early disruption) for the selected treatment to identify a selected N most differentiating peptide structures (e.g., the 20 most differentiating peptide structures) between the first response classification and the second response classification. The statistical algorithm may include, for example, a Wilcoxon rank-sum test.

[0826] Step 606 may include performing a comparison analysis of the plurality of treatment scores. Step 606 may be performed by, for example, determining which of the plurality of treatment scores is a highest-scoring treatment score. In some embodiments, step 606 may include determining that a treatment of the plurality of treatments has a treatment score below a selected threshold and excluding that treatment from the comparison analysis. The selected threshold may be, for example, 0.5.

[0827] Step 608 may include generating a treatment output based on the comparison analysis. The treatment output includes a recommended treatment plan for treating the subject. For example, step 608 may include identifying the treatment of the plurality of treatments having a highest treatment score as a recommended treatment for treating the subject.

[0828] In one or more embodiments, step 608 may include identifying a predicted response classification for the subject for each treatment of the plurality of treatments using a corresponding treatment score of the plurality of treatment scores. The predicted response classification may be, for example, a positive response classification, a negative response classification, or another type of response classification. In one or more embodiments, the predicted response classification for a particular treatment may be, for example, sustained control when the corresponding treatment score is above a selected threshold and may be, for example, early disruption when the corresponding treatment score is not above the selected threshold. The selected threshold may be, for example, 0.5.

[0829] In one or more embodiments, step 608 includes identifying a treatment of the plurality of treatments having a highest treatment score as a highest-scored treatment; determining that the highest treatment score is not above a selected threshold (e.g., 0.5); and generating the treatment output such that the recommended treatment plan includes a recommendation to modify an existing treatment plan for the subject. The recommendation for modifying the treatment plan may include at least one of selecting a different treatment for the subject, altering a dosage for a treatment that is part of the existing treatment plan, or combining the treatment with at least one other treatment.

[0830] In one or more embodiments, when the treatment output includes a recommended treatment, process 600 may optionally include step 610. Step 610 may include administering a therapeutic dosage of a treatment recommended by the treatment output to the subject.

[0831] FIG. 66 is a flowchart of a process for treatment management of a subject diagnosed with a melanoma condition in accordance with various embodiments. Process 700 may be implemented using, for example, at least a portion of workflow 100 as described in FIGS. 1, 2A, and 2B and/or analysis system 300 as described in FIG. 3. In some embodiments, process 700 may be one example that includes and expands upon process 500 in FIG. 64. Further, process 700 may be one example of an implementation of process 600 in FIG. 65.

[0832] Step 702 may include receiving peptide structure data corresponding to a set of peptide structures associated with a set of glycoproteins in a biological sample obtained from the subject. Step 702 may be performed in a manner similar to step 502 as described above with respect to FIG. 64.

[0833] Step 704 may include computing a first treatment score for a first treatment of pembrolizumab using first quantification data identified from the peptide structure data for a first subset of the set of peptide structures, wherein the first subset includes at least one peptide structure identified from a plurality of peptide structures listed in Table 56. The treatment score may be computed using, for example, a proportion of a subset of the plurality of subsets of the set of peptide structures having a selected abundance (e.g., relative abundance for glycopeptide structures and absolute abundance for aglycosylated peptide structures) greater than a reference abundance for that peptide structure as a treatment score of the plurality of treatment scores. In one or more embodiments, the first subset includes all of or a majority of (e.g., more than 15) the peptide structures listed in Table 56.

[0834] Step 706 may include computing a second treatment score for a second treatment comprised of nivolumab and ipilimumab using second quantification data identified from the peptide structure data for a second subset of the set of peptide structures, wherein the second subset includes at least one peptide structure identified from a plurality of peptide structures listed in Table 57. In one or more embodiments, the first subset includes all of or a majority of (e.g., more than 15) the peptide structures listed in Table 57.

[0835] Step 708 may include performing a comparison analysis of the first treatment score and the second treatment score. Step 708 may include, for example, determining which of the first treatment score and the second treatment score is a highest score.

[0836] Step 710 may include generating a treatment output based on the comparison analysis, wherein the treatment output identifies one of the first treatment and the second treatment as a recommended treatment for the subject. For example, step 710 may include identifying the highest-scoring treatment as a recommended treatment for treating the subject. The recommended treatment may then be administered to the subject to treat the subject's melanoma. For example, the treatment may be administered via at least one of intravenous or oral administration at a therapeutic dosage.

[0837] In one or more embodiments, process 700 may optionally include step 712. Step 712 may include administering a therapeutic dosage of the recommended treatment to the subject.

### I.B. Exemplary Methodology for Identifying a Set of Peptide Structures Corresponding to a Treatment

[0838] FIG. 67 is a flowchart of a process for identifying a treatment for a subject diagnosed with a melanoma condition in accordance with one or more embodiments. Process 800 may be implemented using, for example, at least a portion of workflow 100 as described in FIGS. 1, 2A, and 2B and/or analysis system 300 as described in FIG. 3. In some embodiments, process 800 may be one example that includes and expands upon process 500 in FIG. 64.

[0839] Step 802 includes receiving sample data for a sample population in which the sample data characterizes responses of a plurality of sample subjects diagnosed with the melanoma condition to the treatment and includes sample peptide structure data for a collection of peptide structures for each subject of the plurality of sample subjects.

[0840] Step 804 includes grouping the sample data based on the responses of the plurality of sample subjects into a first group corresponding to a first response classification and a second group corresponding to a second response classification.

[0841] Step 806 includes performing a differential abundance analysis using the sample data to compare the first group of the sample data corresponding to the first response classification and the second group of the sample data corresponding to the second response classification to identify a set of peptide structures from the collection of peptide structures. The set of peptide structures may be identified as a selected N most differentiating peptide structures (e.g., the 20 most significant peptide structures for differentiation) between the first response classification and the second response classification. The first response classification may be, for example, sustained control, which indicates an absence of disruption events during a sustained period of time (e.g., 12 months) after treatment administration. The second response classification may be, for example, early disruption, which indicates a presence of at least one disruption event during an initial period of time (e.g., 6 months) after treatment.

[0842] This set of peptide structure that is identified in step 806 may then be used in future analysis (e.g., in process 500 in FIG. 64, in process 600 in FIG. 65, in process 700 in FIG. 66) to compute a treatment score for a subject using the subject's peptide structure profile that indicates the likelihood of a successful response (e.g., sustained control) of the subject to the treatment.

[0843] Step 806 may be performed using, for example, a Wilcoxon rank-sum test in one or more embodiments. Exemplary results of the differential abundance analysis performed using the Wilcoxon rank-sum test are presented below in Table 59A and Table 59B.

TABLE 59A
Wilcoxon Analysis of Peptide Structures associated
with Pembrolizumab Tx

| PS- | | | | | |
|---|---|---|---|---|---|
| ID | Median | Median | Differential | Wilcoxon | |
| NO. | SC | EF | (SC-EF) | p-value | FDR |
| 330 | 0.5016406 | −0.3477531 | 0.8493937 | 0.0017802 | 0.3761093 |
| 331 | 0.5490382 | −0.6903325 | 1.2393706 | 0.0022447 | 0.3761093 |
| 332 | 0.6102916 | −0.4022977 | 1.0125893 | 0.0028112 | 0.3761093 |
| 333 | 0.4726799 | −0.8630625 | 1.3357424 | 0.0034924 | 0.3761093 |
| 334 | 0.9085908 | −0.820044 | 1.7286347 | 0.0043126 | 0.3761093 |
| 335 | −0.0540671 | −0.3156836 | 0.2616165 | 0.0052867 | 0.3761093 |
| 336 | 0.2843746 | −0.31304 | 0.5974146 | 0.0052867 | 0.3761093 |
| 337 | 0.3041313 | −0.568187 | 0.8723183 | 0.0064434 | 0.4011026 |
| 338 | 0.3805894 | −0.3185274 | 0.6991168 | 0.0078028 | 0.4317552 |
| 339 | 0.6412248 | −0.2431649 | 0.8843898 | 0.0093974 | 0.4679899 |
| 340 | −0.0136785 | −0.6949529 | 0.6812744 | 0.0112501 | 0.5093223 |
| 341 | 0.2518882 | −0.4929206 | 0.7448088 | 0.0134001 | 0.5561048 |
| 342 | 0.6384324 | −0.1801925 | 0.8186249 | 0.0158719 | 0.582317 |
| 343 | 0.3603753 | −0.1926793 | 0.5530546 | 0.018709 | 0.582317 |
| 344 | 0.5414354 | −0.2145807 | 0.7560161 | 0.018709 | 0.582317 |
| 345 | −0.0702782 | −0.4763048 | 0.4060266 | 0.018709 | 0.582317 |
| 346 | 0.4330799 | −0.4610782 | 0.8941581 | 0.0219396 | 0.6069946 |
| 347 | 0.2377877 | −0.5018914 | 0.7396791 | 0.0219396 | 0.6069946 |
| 348 | 0.4095444 | −0.313772 | 0.7233164 | 0.029749 | 0.6590555 |
| 349 | 0.1573811 | −0.2217593 | 0.3791404 | 0.029749 | 0.6590555 |

TABLE 59B
Wilcoxon Analysis of Peptide Structures associated with
Ipilimumab/Nivolumab Tx

| PS- | | | | | |
|---|---|---|---|---|---|
| ID | Median | Median | Differential | Wilcoxon | |
| NO. | SC | EF | (SC-EF) | p-value | FDR |
| 350 | 0.3328389 | −0.6312886 | 0.9641274 | 0.0021645 | 0.3761093 |
| 338 | 0.5024846 | 0.0758823 | 0.4266023 | 0.0021645 | 0.3761093 |
| 351 | 1.0534081 | −0.6860991 | 1.7395073 | 0.0021645 | 0.3761093 |
| 352 | 0.7030683 | −0.5793093 | 1.2823776 | 0.0021645 | 0.3761093 |
| 353 | 0.5131039 | −0.792533 | 1.3056369 | 0.0021645 | 0.3761093 |
| 354 | 0.4540561 | −0.9637756 | 1.4178318 | 0.0021645 | 0.3761093 |
| 355 | 0.6041198 | −0.8676916 | 1.4718114 | 0.0021645 | 0.3761093 |
| 356 | 0.3696252 | −0.8139757 | 1.1836009 | 0.0021645 | 0.4011026 |
| 357 | 1.0638627 | −1.0730903 | 2.1369529 | 0.0021645 | 0.4317552 |
| 358 | 0.938314 | −1.056397 | 1.994711 | 0.0021645 | 0.4679899 |
| 359 | 0.1958926 | −0.7169942 | 0.9128868 | 0.004329 | 0.5093223 |
| 360 | 0.3090463 | −1.5388815 | 1.8479278 | 0.004329 | 0.5561048 |
| 361 | 0.9161205 | −0.7184875 | 1.634608 | 0.004329 | 0.582317 |
| 362 | 0.1694553 | −1.6309309 | 1.8003861 | 0.008658 | 0.582317 |
| 363 | 0.3946123 | −0.5476397 | 0.942252 | 0.0151515 | 0.582317 |
| 364 | 0.320616 | −0.4720598 | 0.7926757 | 0.0151515 | 0.582317 |
| 365 | 0.4591413 | −0.6433692 | 1.1025105 | 0.0151515 | 0.6069946 |
| 366 | 0.0750044 | −1.5985227 | 1.6735272 | 0.0151515 | 0.6069946 |
| 341 | 0.3832391 | −0.6207699 | 1.0040091 | 0.0151515 | 0.6590555 |
| 367 | 0.6264716 | 0.1222803 | 0.5041913 | 0.025974 | 0.6590555 |

### VIII. Peptide Structure and Product Ion Compositions, Kits, and Reagents

[0844] Aspects of the disclosure include compositions comprising one or more of the peptide structures listed in Table 1A or 1B. In some embodiments, a composition comprises a plurality of the peptide structures listed in Table 1A or 1B. In some embodiments, a composition comprises 1, 2, 3, 4, 5, 6, 7, 8, 9, 10, 11, 12, 13, 14, 15, 16, 17, 18, 19, 20, 21, 22, 23, 24, 25, 26, 27, 28, or 29 of the peptide structures listed in Table 1A. In some embodiments, a composition comprises 1, 2, 3, 4, 5, 6, 7, 8, 9, 10, 11, 12, 13, or 14 of the peptide structures listed in Table 1B. In some embodiments, a composition comprises a peptide structure having an amino acid sequence with at least 80% sequence identity, such as, for example, at least 81%, 82%, 83%, 84%, 85%, 86%, 87%, 88%, 89%, 90%, 91%, 92%, 93%, 94%, 95%, 96%, 97%, 98%, 99%, or 100% sequence identity to any one of SEQ ID NOs: 1-23, listed in Table 1A. In some embodiments, a composition comprises a peptide structure having an amino acid sequence with at least 80% sequence identity, such as, for example, at least 81%, 82%, 83%, 84%, 85%, 86%, 87%, 88%, 89%, 90%, 91%, 92%, 93%, 94%, 95%, 96%, 97%, 98%, 99%, or 100% sequence identity to any one of SEQ ID NOs: 1-11, listed in Table 1B.

[0845] Aspects of the disclosure include compositions comprising one or more precursor ions having a defined charge and/or defined mass-to-charge (m/z) ratio, as listed in Table 4 below. Aspects of the disclosure include compositions comprising one or more product ions having a defined mass-to-charge (m/z) ratio, which product ions are produced by converting a peptide structure described herein (e.g., a peptide structure listed in Table 1A or 1B) into a gas phase ion in a mass spectrometry system. Conversion of the peptide structure into a gas phase ion can take place using any of a variety of techniques, including, but not limited to, matrix assisted laser desorption ionization (MALDI); electron ionization (EI); electrospray ionization (ESI); atmospheric pressure chemical ionization (APCI); and/or atmospheric pressure photo ionization (APPI).

[0846] Aspects of the disclosure include compositions comprising one or more product ions produced from one or more of the peptide structures described herein (e.g., a peptide structure listed in Table 1A or 1B). In some embodiments, a composition comprises a set of the product ions listed in Table 4, having an m/z ratio selected from the list provided for each peptide structure in Table 4.

[0847] In some embodiments, a composition comprises at least one of peptide structures identified in Table 1A or 1B.

[0848] In some embodiments, a composition comprises a peptide structure or a product ion. The peptide structure or product ion comprises an amino acid sequence having at least 90% sequence identity to any one of SEQ ID NOS: 1-23, as identified in Table 5A below, corresponding to peptide structures in Table 1A.

[0849] In some embodiments, the product ion is selected as one from a group consisting of product ions identified in Table 4, including product ions falling within an identified m/z range of the m/z ratio identified in Table 4 and characterized as having a precursor ion having an m/z ratio within an identified m/z range of the m/z ratio identified in Table 4. A first range for the product ion m/z ratio may be ±0.5. A second range for the product ion m/z ratio may be ±0.8. A third range for the product ion m/z ratio may be ±1.0. A first range for the precursor ion m/z ratio may be ±1.0; a second range for the precursor ion m/z ratio may be (±1.5). Thus, a composition may include a product ion having an m/z ratio that falls within at least one of the first range (±0.5), the second range (±0.8), or the third range (±1.0) of the product ion m/z ratio identified in Table 4, and may be characterized as having a precursor ion having an m/z ratio that falls within at least one of the first range (±0.5), the second range (±1.0), or the third range (±1.0 of the precursor ion m/z ratio identified in Table 4.

[0850] In Table 4, “PS-ID No.” identifies the label or index for the peptide structure; “R; “RT (min)” identifies the minimum retention time; “Coll. Energy” identifies the collision energy; “Precur. m/z” identifies the precursor ion m/z ratio; “Precur. Charge” identifies the precursor ion charge; “1^{st} Prod. m/z” identifies the first product ion m/z ratio; “1^{st} Prod. Charge” identifies the first product ion charge; “2^{nd} Prod. m/z” identifies the second product ion m/z ratio; “2^{nd} Prod. Charge” identifies the second product ion charge.

TABLE 4
Peptide Structures and Mass Spectrometry-Related Characteristics

| | | | | | | 2nd | 2nd | | |
|---|---|---|---|---|---|---|---|---|---|
| PS-ID | Monoisotopic | Precursor | Precursor. | Product | Product. | Product | Product | RT | Collision. |
| NO. | mass | m/z | charge | m/z | charge | m/z | charge | (min) | Energy |
| PS-01 | 3959.660292 | 991.2 | 4 | 366.1 | 1 | 980.5 | 2 | 38.2 | 24 |
| PS-02 | 4366.945898 | 1093.2 | 4 | 366.1 | 1 | 1183.6 | 2 | 44 | 22 |
| PS-03 | 2162.173506 | 721.8 | 3 | 371.24 | 1 | 826.48 | 1 | 44.8 | 10 |
| PS-04 | 4686.909744 | 1173.2 | 4 | 366.1 | 1 | 978.5 | 2 | 30.2 | 28 |
| PS-05 | 5436.174062 | 1360.5 | 4 | 366.1 | 1 | 1062.5 | 2 | 37.8 | 25 |
| PS-06 | 3826.597634 | 958.1 | 4 | 274.1 | 1 | 1059 | 2 | 31.6 | 20 |
| PS-07 | 2792.243936 | 931.8 | 3 | 274.1 | 1 | — | — | 37.6 | 22 |
| PS-08 | 2838.255284 | 710.8 | 4 | 274.1 | 1 | 865.5 | 2 | 6.6 | 20 |
| PS-09 | 4714.215082 | 943.9 | 5 | 204.1 | 1 | 1056.2 | 3 | 40.9 | 15 |
| PS-10 | 2957.14418 | 987.1 | 3 | 366.1 | 1 | 1392.6 | 1 | 7.8 | 32 |
| PS-11 | 3054.196942 | 1019.4 | 3 | 204.1 | 1 | 1360.6 | 1 | 13.9 | 32 |
| PS-12 | 2925.154352 | 976.1 | 3 | 366.1 | 1 | — | — | 12.7 | 20 |
| PS-13 | 3655.51799 | 1220.2 | 4 | 366.1 | 1 | 827.9 | 2 | 27 | 35 |
| PS-14 | 1527.73576 | 764.9 | 2 | 234.1 | 1 | 961.5 | 1 | 23.3 | 28 |
| PS-15 | 2015.062182 | 672.8 | 3 | 683.33 | 1 | — | — | 23.65 | 25 |
| PS-16 | 3317.33853 | 1107.1 | 3 | 366.1 | 1 | 804.4 | 2 | 20.6 | 25 |
| PS-17 | 5754.335366 | 1440.3 | 4 | 366.1 | 1 | — | — | 33.6 | 30 |
| PS-18 | 5432.116952 | 1087.7 | 5 | 366.1 | 1 | — | — | 23.8 | 27 |
| PS-19 | 3640.564606 | 911.4 | 4 | 274.1 | 1 | 820.4 | 2 | 35.7 | 20 |
| PS-20 | 3026.237078 | 1009.8 | 3 | 366.1 | 1 | — | — | 16.2 | 25 |
| PS-21 | 3146.265412 | 787.8 | 4 | 274.1 | 1 | — | — | 7.5 | 25 |
| PS-22 | 6822.69942 | 1366.3 | 5 | 366.1 | 1 | 1206.3 | 4 | 36.8 | 30 |
| PS-23 | 4457.884808 | 1116 | 4 | 274.1 | 1 | — | — | 24.6 | 30 |
| PS-24 | 2658.070174 | 887.4 | 3 | 1360.6 | 1 | — | — | 13.1 | 30 |
| PS-25 | 2820.122994 | 941.1 | 3 | 204.1 | 1 | — | — | 13 | 23 |
| PS-26 | 1329.65645 | 444.2 | 3 | 683.3 | 1 | 796.4 | 1 | 13.7 | 11 |
| PS-27 | 3326.461246 | 1109.8 | 3 | 274.1 | 1 | 1190.6 | 2 | 37.6 | 30 |
| PS-28 | 4775.889354 | 1195.3 | 4 | 366.1 | 1 | — | — | 23.4 | 25 |
| PS-29 | 1628.819166 | 543.95 | 3 | 661.37 | 1 | 530.33 | 1 | 37.8 | 15 |

[0851] Table 5A defines the peptide sequences for SEQ ID NOS: 1-24 from Table 1A. Table 5A further identifies a corresponding protein SEQ ID NO for each peptide sequence. The corresponding protein SEQ ID NO identifies the protein from which the peptide sequence may be derived.

TABLE 5A
Peptide SEQ ID NOS

| Peptide | | Corresponding |
|---|---|---|
| SEQ | | Protein |
| ID NO. | Peptide.sequence | SEQ ID NO. |
| 1 | YLGNATAIFFLPDEGK | 24 |
| 2 | VSNQTLSLFFTVLQDVPVR | 25 |
| 3 | YTGNASALFILPDQDK | 26 |
| 4 | SVQEIQATFFYFTPNK | 27 and 28 |
| 5 | FEVDSPVYNATWSASLK | 29 |
| 6 | FSEFWDLDPEVRPTSAVAA | 30 |
| 7 | SSTTKPPFKPHGSR | 31 |
| 8 | LSLHRPALEDLLLGSEANLTCTLTGLR | 32 and 33 |
| 9 | EEQFNSTFR | 35 |
| 10 | LQAPLNYTEFQK | 36 |
| 11 | FATTFYQHLADSK | 37 |
| 12 | TVVQPSVGAAAGPVVPPCPGR | 38 |
| 13 | SWPAVGNCSSALR | 39 |
| 14 | QVFPGLNYCTSGAYSNASSTDSASYYPLTGDTR | 29 |
| 15 | QDQCIYNTTYLNVQR | 27 |
| 16 | IYSGILNLSDITK | 36 |
| 17 | VLNFTTK | 40 |
| 18 | GHVNITR | 41 |
| 19 | LNDTLDYECHDGYESNTGSTTGSIVCGYNGWSDLPICY | 42 |
| | ER | |
| 20 | ADGTVNQIEGEATPVNLTEPAK | 43 |
| 21 | INHGIL YDEEK | 44 |
| 22 | DKFSEFWDLDPEVRPTSAVAA | 30 |
| 23 | DSHSLTTNIMEILR | 45 |

[0852] Table 5B provides an indication of particular markers and includes the starting position of the peptide sequence within the protein sequence and the end position of the peptide sequence within the protein sequence.

| PS- | | | | |
|---|---|---|---|---|
| ID | | | Start | End |
| NO. | PS-NAME | Peptide.sequence | position | position |
| PS- | A1AT_271_5402 | YLGNATAIFFLPDEGK | 268 | 283 |
| 01 | | | | |
| PS- | A2MG_1424_5402 | VSNQTLSLFFTVLQDVPVR | 1422 | 1440 |
| 02 | | | | |
| PS- | A2MG_1424_NONGLY | VSNQTLSLFFTVLQDVPVR | 1422 | 1440 |
| 03 | COSYLATED | | | |
| PS- | AACT_271_7602 | YTGNASALFILPDQDK | 268 | 283 |
| 04 | | | | |
| PS- | AGP1_93_6503 | QDQCIYNTTYLNVQR | 87 | 101 |
| 28 | | | | |
| PS- | AGP12_72_7604 | SVQEIQATFFYFTPNK | 58 | 73 |
| 05 | | | | |
| PS- | APOB_3895_5401 | FEVDSPVYNATWSASLK | 3887 | 3903 |
| 06 | | | | |
| PS- | APOB_983_5402 | QVFPGLNYCTSGAYSNASSTDSASY | 968 | 1000 |
| 17 | | YPLTGDTR | | |
| PS- | APOC3_74_1101 | FSEFWDLDPEVRPTSAVAA | 81 | 99 |
| 07 | | | | |
| PS- | APOC3_74MC_1102 | DKFSEFWDLDPEVRPTSAVAA | 79 | 99 |
| 27 | | | | |
| PS- | APOD_98_5402 | ADGTVNQIEGEATPVNLTEPAK | 83 | 104 |
| 23 | | | | |
| PS- | AGP1_93_7604 | QDQCIYNTTYLNVQR | 87 | 101 |
| 18 | | | | |
| PS- | CFAH_529_5402 | LNDTLDYECHDGYESNTGSTTGSIV | 528 | 567 |
| 22 | | CGYNGWSDLPICYER | | |
| PS- | CO6_324_5402 | VLNFTTK | 322 | 328 |
| 20 | | | | |
| PS- | KLKB1_453_5402 | IYSGILNLSDITK | 447 | 459 |
| 19 | | | | |
| PS- | THRB_121_5412 | GHVNITR | 118 | 124 |
| 21 | | | | |
| PS- | FETUA_346_NONGLY | TVVQPSVGAAAGPVVPPCPGR | 341 | 361 |
| 15 | COSYLATED | | | |
| PS- | HEMO_187_5401 | SWPAVGNCSSALR | 181 | 193 |
| 16 | | | | |
| PS- | HRG_271_2202 | SSTTKPPFKPHGSR | 271 | 284 |
| 08 | | | | |
| PS- | IGA12_144_4401 | LSLHRPALEDLLLGSEANLTCTLTGL | 127 | 153 |
| 09 | | R | | |
| PS- | IGG1_297_5410 | EEQYNSTYR | 176 | 184 |
| 10 | | | | |
| PS- | IGG2_297_3500 | EEQFNSTFR | 172 | 180 |
| 24 | | | | |
| PS- | IGG2_297_4411 | EEQFNSTFR | 172 | 180 |
| 11 | | | | |
| PS- | IGG2_297_4500 | EEQFNSTFR | 172 | 180 |
| 25 | | | | |
| PS- | IGG2_297_5410 | EEQFNSTFR | 172 | 180 |
| 12 | | | | |
| PS- | KLKB1_494MC_5402 | LQAPLNYTEFQK | 489 | 500 |
| 13 | | | | |
| PS- | PLASMAFGA_DSHSL | DSHSLTTNIMEILR | 101 | 114 |
| 29 | TTNIMEILR | | | |
| PS- | ANT3_FATTFYQHLA | FATTFYQHLADSK | 90 | 102 |
| 14 | DSK | | | |
| PS- | FHR1_INHGILYDEEK | INHGIL YDEEK | 28 | 38 |
| 26 | | | | |

[0853] Table 6 identifies the proteins of SEQ TD NOS: 24-45 from Table 5A. Table 6 identifies a corresponding protein abbreviation and protein name for each of protein SEQ TD NOS: 24-45. Further, Table 6 identifies a corresponding Uniprot TD for each of protein SEQ ID NOS: 24-45.

TABLE 6
Protein SEQ ID NOS

| SEQ | Protein | | |
|---|---|---|---|
| ID | Abbre- | | Uniprot |
| NO. | viation | Protein Name | ID |
| 24 | A1AT | Alpha-1 Antitrypsin | P01009 |
| 25 | A2MG | Alpha-2-Macroglobulin | P01023 |
| 26 | AACT | Alpha 1-Antichymotrypsin | P01011 |
| 27 | AGP1 | Alpha-1-acid glycoprotein 1 | P02763 |
| 28 | AGP2 | Alpha-1-acid glycoprotein 2 | P19652 |
| 30 | APOC3 | Apolipoprotein C-III | P02656 |
| 29 | APOB | Apolipoprotein B-100 | P04114 |
| 31 | HRG | Histidine-rich Glycoprotein | P04196 |
| 40 | CO6 | Complement component C6 | P13671 |
| 32 | IGA1 | Immunoglobulin alpha-1 | P01876 |
| 33 | IGA2 | Immunoglobulin alpha-2 | P01877 |
| 34 | IGG1 | Immunoglobulin gamma-1 | P01857 |
| 35 | IGG2 | Immunoglobulin gamma-2 | P01859 |
| 36 | KLKB1 | Plasma Kallikrein | P03952 |
| 37 | ANT3 | Antithrombin-III | P01008 |
| 38 | FETUA | Alpha-2-HS-glycoprotein | P02765 |
| 39 | HEMO | Hemopexin | P02790 |
| 41 | THRB | Prothrombin | P00734 |
| 42 | CFAH | Complement Factor H | P08603 |
| 43 | APOD | Apolipoprotein D | P05090 |
| 44 | FHR1 | Complement factor H-related protein 1 | Q03591 |
| 45 | FGA | Fibrinogen alpha chain | P02671 |

[0854] Table 7 identifies and defines the glycan structures included at least in Table 1B. Table 7 identifies a graphical representation of the one or more glycan structures associated with a particular glycan and a coded representation of the composition for each glycan structure included at least in Table 1B. As used herein, the 4-digit GL NO. is a designation that represents the number of hexoses, the number of HexNAcs, the number of Fucoses, and the number of Neuraminic Acids.

TABLE 7
Glycan Structure GL NOS: Structure and Composition

| Composition | Structure | Glycan composition | Class | Glycan Mass |
|---|---|---|---|---|
| 1101 | [symbol] | Hex(1)HexNAc(1)Fuc(0)NeuAc(1) | O-glycan | 656.227598 |
| 1102 | [symbol] | Hex(1)HexNAc(1)Fuc(0)NeuAc(2) | O-glycan | 947.323008 |
| 2202 | [symbol] | Hex(2)HexNAc(2)Fuc(0)NeuAc(2) | O-glycan | 1312.455196 |
| 3500 | [symbol] | Hex(3)HexNAc(5)Fuc(0)NeuAc(0) | N-glycan | 1501.5553 |
| 4401 | [symbol] | Hex(4)HexNAc(4)Fuc(0)NeuAc(1) | N-glycan | 1751.624162 |
| 4411 | [symbol] | Hex(4)HexNAc(4)Fuc(1)NeuAc(0) | N-glycan | 1897.682068 |
| 4500 | [symbol] | Hex(4)HexNAc(5)Fuc(0)NeuAc(0) | N-glycan | 1663.60812 |
| 5400 | [symbol] | Hex(5)HexNAc(4)Fuc(0)NeuAc(0) | N-glycan | 1622.581572 |
| 5401 | [symbol] | Hex(5)HexNAc(4)Fuc(0)NeuAc(1) | N-glycan | 1913.676982 |
| 5402 | [symbol] | Hex(5)HexNAc(4)Fuc(0)NeuAc(2) | N-glycan | 2204.772392 |
| 5410 | [symbol] | Hex(5)HexNAc(4)Fuc(1)NeuAc(0) | N-glycan | 1768.639478 |
| 5411 | [symbol] | Hex(5)HexNAc(4)Fuc(1)NeuAc(1) | N-glycan | 2059.734888 |
| 5412 | [symbol] | Hex(5)HexNAc(4)Fuc(1)NeuAc(2) | N-glycan | 2350.830298 |
| 6311 | [symbol] | Hex(6)HexNAc(3)Fuc(1)NeuAc(1) | N-glycan | 2018.70834 |
| 6503 | [symbol] | Hex(6)HexNAc(5)Fuc(0)NeuAc(3) | N-glycan | 2860.99999 |
| 7602 | [symbol] | Hex(7)HexNAc(6)Fuc(0)NeuAc(2) | N-glycan | 2935.036768 |
| 7604 | [symbol] | Hex(7)HexNAc(6)Fuc(0)NeuAc(4) | N-glycan | 3517.227588 |

Legend for Table 7

| | | | | |
|---|---|---|---|---|
| ● | [symbol] | [symbol] | [symbol] | [symbol] |
| Glc | Gal | Man | Fuc | Neu5Ac |
| ▪ | [symbol] | [symbol] | [symbol] | [symbol] |
| GlcNAc | GlcNAc | ManNAc | Xyl | Neu5Gc |
| [symbol] | [symbol] | [symbol] | | [symbol] |
| GlcN | GalN | ManN | | Kdn |
| [symbol] | [symbol] | [symbol] | [symbol] | |
| GlcA | GalA | ManA | IdoA | |

[0855] Aspects of the disclosure include kits comprising one or more compositions, each comprising one or more peptide structures of the disclosure that can be used as assay standards, and instructions for use. Kits in accordance with various embodiments described herein may include a label indicating the intended use of the contents of the kit. The term “label” as used herein with respect to a kit includes any writing, or recorded material supplied on or with a kit, or that otherwise accompanies a kit.

[0856] The peptide structures and the transitions produced therefrom, as described herein, may be useful for diagnosing and treating various disease states within FLD, including, without limitation, NASH or early/late stage thereof. A transition includes a precursor ion and at least one product ion grouping. As described herein, the peptide structures in Table 1, as well as their corresponding precursor ion and product ion groupings (these ions having defined m/z ratios or m/z ratios that fall within the m/z ranges identified herein), can be used in mass spectrometry-based analyses to diagnose and facilitate treatment of diseases, such as, for example, NASH.

[0857] Aspects of the disclosure include methods for analyzing one or more peptide structures, as described herein. In some embodiments, the methods involve processing a sample from a patient to generate a prepared sample that can be inputted into a mass spectrometry system (e.g., a reaction monitoring mass spectrometry system) using, for example, a liquid chromatography system (e.g., a high-performance liquid chromatography system (HPLC)). In various embodiments, processing the sample can comprise performing one or more of: a denaturation procedure, a reduction procedure, an alkylation procedure, and a digestion procedure. The denaturation and reduction procedures may be implemented in a manner similar to, for example, denaturation and reduction 202 in FIG. 2. The alkylation procedure may be implemented in a manner similar to, for example, alkylation procedure 204 in FIG. 2. The digestion procedure may be implemented in a manner similar to, for example, digestion procedure 206 in FIG. 2.

[0858] In some embodiments, the methods for analyzing one or more peptide structures involve detecting a set of product ions generated by a mass spectrometry system (e.g., a reaction monitoring mass spectrometry system) in which one or more product ions may correspond to each of the one or more peptide structures that have been inputted into the mass spectrometry system. As described herein, each peptide structure can be converted into a set of product ions having a defined m/z ratio, as provided in Table 4, or an m/z ratio within an identified range of the m/z ratio provided in Table 4. In some embodiments, the methods involve generating quantification (e.g., abundance) data for the one or more product ions detected using the mass spectrometry system.

[0859] In some embodiments, the methods further comprise generating a diagnosis output using the quantification data and a model that has been trained using supervised and/or unsupervised machine learning. In various embodiments, the reaction monitoring mass spectrometry system may include multiple/selected reaction monitoring mass spectrometry (MRM/SRM-MS) to detect the one or more product ions and generate the quantification data. Aspects of the disclosure include compositions comprising one or more of the peptide structures listed in Table 16. In some embodiments, a composition comprises a plurality of the peptide structures listed in Table 16. In some embodiments, a composition comprises 1, 2, 3, 4, 5, 6, 7, 8, 9, 10, 11, 12, 13, 14, 15, 16, 17, 18, 19, 20, 21, 22, 23, 24, 25, 26, 27, 28, 29, 30, 31, 32, 33, 34, 35, 36, 37, 38, 39, 40, 41, 42, 43, 44, 45, 46, 47, 48, 39, 50, 51, 52, 53, 54, or all of the peptide structures listed in Table 16. In some embodiments, a composition comprises a peptide structure having an amino acid sequence with at least 80% sequence identity, such as, for example, at least 81%, 82%, 83%, 84%, 85%, 86%, 87%, 88%, 89%, 90%, 91%, 92%, 93%, 94%, 95%, 96%, 97%, 98%, 99%, or 100% sequence identity to any one of SEQ ID NOs: 77-119, listed in Table 16. Aspects of the disclosure include compositions comprising one or more precursor ions having a defined charge and/or defined mass-to-charge (m/z) ratio, as listed in Table 18. Aspects of the disclosure include compositions comprising one or more product ions having a defined mass-to-charge (m/z) ratio, which product ions are produced by converting a peptide structure described herein (e.g., a peptide structure listed in Table 16) into a gas phase ion in a mass spectrometry system. Conversion of the peptide structure into a gas phase ion can take place using any of a variety of techniques, including, but not limited to, matrix assisted laser desorption ionization (MALDI); electron ionization (EI); electrospray ionization (ESI); atmospheric pressure chemical ionization (APCI); and/or atmospheric pressure photo ionization (APPI).

[0860] Aspects of the disclosure include compositions comprising one or more product ions produced from one or more of the peptide structures described herein (e.g., a peptide structure listed in Table 16). In some embodiments, a composition comprises a set of the product ions listed in Table 18, having an m/z ratio selected from the list provided for each peptide structure in Table 16 or Table 18.

[0861] In some embodiments, a composition comprises at least one of peptide structures PS-48 through PS-102 identified in Table 16. In one or more embodiments, a composition comprises at least 1, at least 2, at least 3, at least 4, at least 5, at least 6, at least 7, at least 8, at least 9, at least 10, at least 11, at least 12, at least 13, at least 14, at least 15, at least 16, at least 17, at least 18, at least 19, at least 20, at least 21, at least 22, at least 23, at least 23, at least 24, at least 25, at least 26, at least 27, at least 28, at least 29, at least 30, at least 31, at least 32, at least 33, at least 34, at least 35, at least 36, at least 37, at least 38, at least 39, at least 40, at least 41, at least 42, at least 43, at least 44, at least 45, at least 46, at least 47, at least 48, at least 49, at least 50, at least 51, at least 52, at least 53, at least 54, or all 55 of the peptide structures PS-48 through PS-102 in Table 16.

[0862] In one or more embodiments, a composition comprises at least 1, at least 2, at least 3, at least 4, at least 5, at least 6, at least 7, at least 8, at least 9, at least 10, at least 11, at least 12, at least 13, at least 14, at least 15, at least 16, at least 17, at least 18, at least 19, at least 20, at least 21, or all 22 of the peptide structures PS-49, PS-50, PS-54, PS-61, PS-63, PS-64, PS-71, PS-79, PS-81, PS-84, PS-86, PS-87, PS-90, PS-91, PS-92, PS-94, PS-95, PS-96, PS-97, PS-98, PS-99, or PS-101 in Table 17A. In one or more embodiments, a composition comprises at least 1, at least 2, at least 3, at least 4, at least 5, at least 6, at least 7, at least 8, at least 9, at least 10, at least 11, at least 12, at least 13, at least 14, at least 15, at least 16, at least 17, at least 18, or all 19 of the peptide structures PS-48, PS-52, PS-57, PS-61, PS-62, PS-63, PS-64, PS-69, PS-71, PS-72, PS-73, PS-84, PS-86, PS-88, PS-91, PS-94, PS-96, PS-100, or PS-101 in Table 17B.

[0863] In one or more embodiments, a composition comprises at least 1, at least 2, at least 3, at least 4, at least 5, at least 6, at least 7, at least 8, at least 9, at least 10, at least 11, at least 12, at least 13, at least 14, at least 15, at least 16, or all 17 of the peptide structures PS-48, PS-52, PS-61, PS-64, PS-66, PS-68, PS-69, PS-71, PS-72, PS-73, PS-86, PS-89, PS-91, PS-94, PS-96, PS-99, or PS-101 in Table 17C.

[0864] In some embodiments, a composition comprises a peptide structure or a product ion. The peptide structure or product ion comprises an amino acid sequence having at least 90% sequence identity to any one of SEQ ID NOS: 77-119, as identified in Table 19, corresponding to peptide structures PS-48 through PS-102 in Table 16.

[0865] In some embodiments, a composition comprises a peptide structure or a product ion. The peptide structure or product ion comprises an amino acid sequence having at least 90% sequence identity to any one of SEQ ID NOS: 77-119, as identified in Table 19, corresponding to peptide structures PS-48 through PS-102 in Table 16.

[0866] In some embodiments, the product ion is selected as one from a group consisting of product ions identified in Table 18, including product ions falling within an identified m/z range of the m/z ratio identified in Table 18 and characterized as having a precursor ion having an m/z ratio within an identified m/z range of the m/z ratio identified in Table 18. A first range for the product ion m/z ratio may be ±0.5. A second range for the product ion m/z ratio may be ±0.8. A third range for the product ion m/z ratio may be 1.0. A first range for the precursor ion m/z ratio may be ±1.0; a second range for the precursor ion m/z ratio may be (±1.5). Thus, a composition may include a product ion having an m/z ratio that falls within at least one of the first range (±0.5), the second range (±0.8), or the third range (1.0) of the product ion m/z ratio identified in Table 18, and characterized as having a precursor ion having an m/z ratio that falls within at least one of first range (±0.5), a second range (1.0), or a third range (1.0 of the precursor ion m/z ratio identified in Table 18.

TABLE 18
Mass Spectrometry-Related Characteristics for the Peptide
Structures associated with Pancreatic Cancer

| | Mono- | | | | | | 2nd |
|---|---|---|---|---|---|---|---|
| PS- | isotopic | RT | Precursor | Precurs. | | | Product |
| NAME | mass | (min) | m/z | charge | Product m/z | Collision.Energy | m/z |
| 48 | 6041.646782 | 42.8 | 1209.8 | 5 | 366.1 | 30 | 1299 |
| 49 | 6406.77897 | 42.7 | 1282.9 | 5 | 366.1 | 30 | 1299 |
| 50 | 3690.816484 | 42.5 | 924.3 | 4 | 833.9 | 25 | 782.3 |
| 51 | 5385.40009 | 47.1 | 1347.9 | 4 | 366.1 | 35 | 274.1 |
| 52 | 6040.44195 | 33.3 | 1209.7 | 5 | 1347.9 | 15 | 366.1 |
| 53 | 2162.173506 | 44.8 | 721.8 | 3 | 371.24 | 10 | 826.48 |
| 54 | 4950.310912 | 38.8 | 1239.1 | 4 | 1314.2 | 25 | N/A |
| 55 | 5647.565058 | 39.3 | 1413.6 | 4 | 366.1 | 30 | 1313.3 |
| 56 | 4344.878414 | 40.165 | 1450 | 3 | 366.1 | 30 | 1318.7 |
| 57 | 4747.055968 | 42 | 1188.2 | 4 | 366.1 | 25 | N/A |
| 58 | 5326.297412 | 35.1 | 1066.7 | 5 | 366.1 | 22 | 1206.6 |
| 59 | 5617.392822 | 35.9 | 1124.9 | 5 | 366.1 | 25 | 1206.2 |
| 60 | 5285.270864 | 35.2 | 1058.5 | 5 | 366.1 | 20 | 1206.6 |
| 61 | 4467.835462 | 30.6 | 1118.2 | 4 | 366.1 | 30 | 978.5 |
| 62 | 5578.174858 | 23.8 | 1116.9 | 5 | 366.1 | 25 | 1060 |
| 63 | 3146.170176 | 5 | 1050.1 | 3 | 274.1 | 35 | 999.4 |
| 64 | 4562.887832 | 35.9 | 1142.2 | 4 | 366.1 | 20 | N/A |
| 65 | 5755.448988 | 41 | 1152.7 | 5 | 366.1 | 28 | 1550.3 |
| 66 | 3826.597634 | 31.6 | 958.1 | 4 | 274.1 | 20 | 1059 |
| 67 | 5754.335366 | 33.6 | 1440.3 | 4 | 366.1 | 30 | N/A |
| 68 | 3600.388632 | 19.1 | 1201.5 | 3 | 274.1 | 30 | 1453.6 |
| 69 | 4444.818994 | 29 | 1112.7 | 4 | 366.1 | 20 | 1368.1 |
| 70 | 4735.914404 | 29.8 | 1185.5 | 4 | 366.1 | 25 | 1368.1 |
| 71 | 5730.401612 | 41 | 1147.8 | 5 | 366.1 | 25 | 366.1 |
| 72 | 4476.821874 | 27.4 | 1120.7 | 4 | 204.1 | 25 | 1165.5 |
| 73 | 2582.037538 | 3.9 | 862 | 3 | 366.1 | 20 | N/A |
| 74 | 2873.132948 | 3.8 | 959.1 | 3 | 366.1 | 30 | N/A |
| 75 | 4121.669544 | 27.1 | 1031.9 | 4 | 204.1 | 30 | N/A |
| 76 | 3754.491846 | 21.3 | 1253.2 | 3 | 366.1 | 30 | 804.3 |
| 77 | 3648.549244 | 29.7 | 913.4 | 4 | 366.1 | 15 | 1234 |
| 78 | 4731.839512 | 40.5 | 1184.5 | 4 | 204.1 | 35 | N/A |
| 79 | 7034.688732 | 13.2 | 1173.6 | 6 | 366.1 | 29 | N/A |
| 80 | 4218.740064 | 28.4 | 1056.2 | 4 | 366.1 | 25 | 366.1 |
| 81 | 3259.26547 | 10 | 1087.8 | 3 | 366.1 | 30 | 1112.5 |
| 82 | 4304.857476 | 35.5 | 1077.7 | 4 | 204.1 | 30 | 1152.6 |
| 83 | 4450.915382 | 35.4 | 1114.2 | 4 | 204.1 | 30 | 1152.6 |
| 84 | 4961.085074 | 35.8 | 1241.8 | 4 | 204.1 | 35 | 1152.6 |
| 85 | 5107.14298 | 35.7 | 1278.3 | 4 | 204.1 | 40 | 1152.6 |
| 86 | 4517.13034 | 39.4 | 1130.8 | 4 | 204.1 | 35 | 1258.7 |
| 87 | 4464.14622 | 40.2 | 1117.1 | 4 | 204.1 | 27 | N/A |
| 88 | 2633.03854 | 7.9 | 879 | 3 | 204.1 | 21 | 1392.6 |
| 89 | 2690.060002 | 8.1 | 898 | 3 | 1392.6 | 25 | N/A |
| 90 | 2836.117908 | 8.1 | 946.5 | 3 | 204.1 | 15 | 1392.6 |
| 91 | 2658.070174 | 13.1 | 887.4 | 3 | 1360.6 | 30 | N/A |
| 92 | 4228.73181 | 31 | 1058.3 | 4 | 1284.7 | 20 | N/A |
| 93 | 5107.176866 | 33.5 | 1277.8 | 4 | 366.1 | 38 | N/A |
| 94 | 1178.665896 | 30.6 | 590.3 | 2 | 725.4 | 15 | 342.2 |
| 95 | 1234.680878 | 35.2 | 618.3 | 2 | 736.4 | 17 | 936.5 |
| 96 | 816.485756 | 23.2 | 409.2 | 2 | 599.4 | 10 | 486.3 |
| 97 | 1121.61928 | 9.5 | 561.8 | 2 | 244.2 | 25 | 455.3 |
| 98 | 1542.756554 | 22.7 | 772.4 | 2 | 680.3 | 22 | 978.4 |
| 99 | 2454.143774 | 33.7 | 819.1 | 3 | 855.5 | 25 | 609.3 |
| 100 | 3247.313088 | 16.9 | 1083.8 | 3 | 204.1 | 30 | N/A |
| 101 | 3389.421198 | 26.2 | 1131.1 | 3 | 366.1 | 28 | 840.4 |
| 102 | 2824.143062 | 23.8 | 942.4 | 3 | 366.1 | 23 | 1114.6 |

[0867] Table 19A defines the peptide sequences for SEQ ID NOS: 77-119 from Table 16. Table 19 further identifies a corresponding protein SEQ TD NO. for each peptide sequence.

TABLE 19A
Peptide SEQ ID NOS

| Peptide | | Corresponding |
|---|---|---|
| SEQ ID | | Protein |
| NO. | Peptide | SEQ ID NO. |
| 77 | ADTHDEILEGLNFNLTEIPEAQIHEGFQELLR | 120 |
| 78 | QLAHQSNSTNIFFSPVSIATAFAMLSLGTK | 120 |
| 79 | EGDHEFLEVPEAQEDVEATFPVHQPGNYSCSY | 121 |
| | R | |
| 80 | VSNQTLSLFFTVLQDVPVR | 122 |
| 81 | IITILEEEMNVSVCGLYTYGKPVPGHVTVSICR | 122 |
| 82 | IITILEEEMNVSVCGLYTYGK | 122 |
| 83 | GCVLLSYLNETVTVSASLESVR | 122 |
| 84 | SLGNVNFTVSAEALESQELCGTEVPSVPEHGR | 122 |
| 85 | YTGNASALFILPDQDK | 123 |
| 86 | QDQCIYNTTYLNVQR | 123 |
| 87 | NEEYNK | 125 & 126 |
| 88 | SVQEIQATFFYFTPNK | 125 & 126 |
| 89 | SVQEIQATFFYFTPNKTEDTIFLR | 125 & 126 |
| 90 | FEVDSPVYNATWSASLK | 127 |
| 91 | QVFPGLNYCTSGAYSNASSTDSASYYPLTGDTR | 127 |
| 92 | LGNWSAMPSCK | 128 |
| 93 | TELFSSSCPGGIMLNETGQGYQR | 129 |
| 94 | NCGVNCSGDVFTALIGEIASPNYPKPYPENSR | 130 |
| 95 | ENLTAPGSDSAVFFEQGTTR | 131 |
| 96 | ANISHK | 132 |
| 97 | VCQDCPLLAPLNDTR | 133 |
| 98 | SWPAVGNCSSALR | 134 |
| 99 | ALPQPQNVTSLLGCTH | 134 |
| 100 | CSDGWSFDATTLDDNGTMLFFK | 134 |
| 101 | NLFLNHSENATAK | 135 |
| 102 | VIDFNCTTSSVSSALANTK | 136 |
| 103 | DTFVNASR | 137 |
| 104 | VLSNNSDANLELINTWVAK | 137 |
| 105 | VGQLQLSHNLSL VIL VPQNLK | 137 |
| 106 | LSLHRPALEDLLLGSEANLTCTLTGLR | 138 & 139 |
| 107 | EEQYNSTYR | 140 |
| 108 | EEQFNSTFR | 141 |
| 109 | STGKPTLYNVSLVMSDTAGTCY | 142 |
| 110 | LQAPLNYTEFQKPICLPSK | 143 |
| 111 | DLLLPQPDLR | 144 |
| 112 | DLATVYVDVLK | 145 |
| 113 | AFLLTPR | 146 |
| 114 | VNHVTLSQPK | 147 |
| 115 | SYTITGLQPGTDYK | 148 |
| 116 | TSESGELHGLTTEEEFVEGIYK | 149 |
| 117 | LDVDQALNR | 150 |
| 118 | CGLVPVLAENYNK | 151 |
| 119 | NGSLFAFR | 152 |

[0868] Table 19B provides an indication of particular markers and includes the starting position of the peptide sequence within the protein sequence and the end position of the peptide sequence within the protein sequence.

TABLE 19B
Markers and Protein Positions

| | | | Start | End |
|---|---|---|---|---|
| PS-ID | PS-NAME | Peptide sequence | position | position |
| 48 | A1AT_107_5412 | ADTHDEILEGLNFNLTEIPEAQI | 94 | 125 |
| | | HEGFQELLR | | |
| 49 | A1AT_107_6512 | ADTHDEILEGLNFNLTEIPEAQI | 94 | 125 |
| | | HEGFQELLR | | |
| 50 | A1AT_107_ | ADTHDEILEGLNFNLTEIPEAQI | 94 | 125 |
| | NONGLYCOSYLATED | HEGFQELLR | | |
| 51 | A1AT_70_5402 | QLAHQSNSTNIFFSPVSIATAFA | 64 | 93 |
| | | MLSLGTK | | |
| 52 | A1BG_179_5402 | EGDHEFLEVPEAQEDVEATFP | 153 | 185 |
| | | VHQPGNYSCSYR | | |
| 53 | A2MG_1424_ | VSNQTLSLFFTVLQDVPVR | 1422 | 1440 |
| | NONGLYCOSYLATED | | | |
| 54 | A2MG_247_5200 | IITILEEEMNVSVCGLYTYGKP | 238 | 270 |
| | | VPGHVTVSICR | | |
| 55 | A2MG_247_5401 | IITILEEEMNVSVCGLYTYGKP | 238 | 270 |
| | | VPGHVTVSICR | | |
| 56 | A2MG_247MC_5401 | IITILEEEMNVSVCGLYTYGK | 238 | 258 |
| 57 | A2MG_55_5412 | GCVLLSYLNETVTVSASLESVR | 47 | 68 |
| 58 | A2MG_869_5401 | SLGNVNFTVSAEALESQELCG | 864 | 895 |
| | | TEVPSVPEHGR | | |
| 59 | A2MG_869_5402 | SLGNVNFTVSAEALESQELCG | 864 | 895 |
| | | TEVPSVPEHGR | | |
| 60 | A2MG_869_6301 | SLGNVNFTVSAEALESQELCG | 864 | 895 |
| | | TEVPSVPEHGR | | |
| 61 | AACT_271_6512 | YTGNASALFILPDQDK | 268 | 283 |
| 62 | AGP1_93_7614 | QDQCIYNTTYLNVQR | 87 | 101 |
| 63 | AGP12_56_5412 | NEEYNK | 52 | 57 |
| 64 | AGP12_72_7601 | SVQEIQATFFYFTPNK | 58 | 73 |
| 65 | AGP12_72MC_6503 | SVQEIQATFFYFTPNKTEDTIFL | 58 | 81 |
| | | R | | |
| 66 | APOB_3895_5401 | FEVDSPVYNATWSASLK | 3887 | 3903 |
| 67 | APOB_983_5402 | QVFPGLNYCTSGAYSNASSTD | 968 | 1000 |
| | | SASYYPLTGDTR | | |
| 68 | APOH_253_5412 | LGNWSAMPSCK | 251 | 261 |
| 69 | APOM_135_5401 | TELFSSSCPGGIMLNETGQGYQ | 121 | 143 |
| | | R | | |
| 70 | APOM_135_5402 | TELFSSSCPGGIMLNETGQGYQ | 121 | 143 |
| | | R | | |
| 71 | C1S_174_5402 | NCGVNCSGDVFTALIGEIASPN | 170 | 201 |
| | | YPKPYPENSR | | |
| 72 | CERU_397_5412 | ENLTAPGSDSAVFFEQGTTR | 396 | 415 |
| 73 | CO5_741_5401 | ANISHK | 740 | 745 |
| 74 | CO5_741_5402 | ANISHK | 740 | 745 |
| 75 | FETUA_156_5412 | VCQDCPLLAPLNDTR | 145 | 159 |
| 76 | HEMO_187_5412 | SWPAVGNCSSALR | 181 | 193 |
| 77 | HEMO_453_5401 | ALPQPQNVTSLLGCTH | 447 | 462 |
| 78 | HEMO_64_5402 | CSDGWSFDATTLDDNGTMLFF | 50 | 71 |
| | | K | | |
| 79 | HPT_207_121015 | NLFLNHSENATAK | 203 | 215 |
| 80 | HRG_125_5402 | VIDFNCTTSSVSSALANTK | 121 | 139 |
| 81 | IC1_238_5412 | DTFVNASR | 234 | 241 |
| 82 | IC1_253_5402 | VLSNNSDANLELINTWVAK | 250 | 268 |
| 83 | IC1_253_5412 | VLSNNSDANLELINTWVAK | 250 | 268 |
| 84 | IC1_253_6503 | VLSNNSDANLELINTWVAK | 250 | 268 |
| 85 | IC1_253_6513 | VLSNNSDANLELINTWVAK | 250 | 268 |
| 86 | IC1_352_5402 | VGQLQLSHNLSLVILVPQNLK | 344 | 364 |
| 87 | IGA12_144_3500 | LSLHRPALEDLLLGSEANLTCT | 127 | 153 |
| | | LTGLR | (P01876) or | (P01876) or |
| | | | 114 | 140 |
| | | | (P01877) | (P01877) |
| 88 | IGG1_297_3410 | EEQYNSTYR | 176 | 184 |
| 89 | IGG1_297_3500 | EEQYNSTYR | 176 | 184 |
| 90 | IGG1_297_3510 | EEQYNSTYR | 176 | 184 |
| 91 | IGG2_297_3500 | EEQFNSTFR | 172 | 180 |
| 92 | IGM_439_9200 | STGKPTLYNVSLVMSDTAGTC | 432 | 453 |
| | | Y | | |
| 93 | KLKB1_494_6503 | LQAPLNYTEFQKPICLPSK | 489 | 507 |
| 94 | QUANTPEP- | DLLLPQPDLR | 230 | 239 |
| | A2GL_DLLLPQPDLR | | | |
| 95 | QUANTPEP- | DLATVYVDVLK | 37 | 47 |
| | APOA1_ | | | |
| | DLATVYVDVLK | | | |
| 96 | QUANTPEP- | AFLLTPR | 172 | 178 |
| | APOM_AFLLTPR | | | |
| 97 | QUANTPEP- | VNHVTLSQPK | 102 | 111 |
| | B2M_VNHVTLSQPK | | | |
| 98 | QUANTPEP- | SYTITGLQPGTDYK | 1958 | 1971 |
| | FINC_ | | | |
| | SYTITGLQPGTDYK | | | |
| 99 | QUANTPEP- | TSESGELHGLTTEEEFVEGIYK | 69 | 90 |
| | TTR_ | | | |
| | TSESGELHGLTTEEE | | | |
| | FVEGIYK | | | |
| 100 | SHBG_380_5402 | LDVDQALNR | 373 | 381 |
| 101 | TRFE_432_5401 | CGLVPVLAENYNK | 421 | 433 |
| 102 | VTNC_169_5401 | NGSLFAFR | 169 | 176 |

[0869] Table 20 identifies the proteins of SEQ ID NOS: 44-76 from Table 16. Table 20 identifies a corresponding protein abbreviation and protein name for each of protein SEQ ID NOS: 44-76. Further, Table 20 identifies a corresponding Uniprot ID for each of protein SEQ ID NOS: 44-76.

TABLE 20
Protein SEQ ID NOS

| Protein | | (Protein) | |
|---|---|---|---|
| Abbre- | | SEQ ID | |
| viation | Protein Name | NO. | Uniprot ID |
| A1AT | Alpha-1-antitrypsin | 120 | P01009 |
| A1BG | Alpha-1B-glycoprotein | 121 | P04217 |
| A2MG | Alpha-2-macroglobulin | 122 | P01023 |
| AACT | Alpha-1-antichymotrypsin | 123 | P01011 |
| AGP1 | Alpha-1-acid glycoprotein 1 | 124 | P02763 |
| AGP12 | Alpha-1-acid glycoprotein 1&2 | 125 & | P02763&P19652 |
| | | 126 | |
| APOB | Apolipoprotein B-100 | 127 | P04114 |
| APOH | Beta-2-glycoprotein1 | 128 | P02749 |
| APOM | Apolipoprotein M | 129 | O95445 |
| C1S | Complement Cls subcomponent | 130 | P09871 |
| CERU | Ceruloplasmin | 131 | P00450 |
| CO5 | ComplementC5 | 132 | P01031 |
| FETUA | Alpha-2-HS-glycoprotein | 133 | P02765 |
| HEMO | Hemopexin | 134 | P02790 |
| HPT | Haptoglobin | 135 | P00738 |
| HRG | Histidine-rich Glycoprotein | 136 | P04196 |
| IC1 | Plasma protease C1 inhibitor | 137 | P05155 |
| IGA12 | Immunoglobulin heavy | 138 & | P01876 or |
| | constant alpha 1&2 | 139 | P01877 |
| IGG1 | Immunoglobulin heavy | 140 | P01857 |
| | constant gamma 1 | | |
| IGG2 | Immunoglobulin heavy | 141 | P01859 |
| | constant gamma 2 | | |
| IGM | Immunoglobulin heavy | 142 | P01871 |
| | constant mu | | |
| KLKB1 | Plasma Kallikrein | 143 | P03952 |
| A2GL | Leucine-richAlpha- | 144 | P02750 |
| | 2-glycoprotein | | |
| APOA1 | Apolipoprotein A-I | 145 | P02647 |
| APOM | Apolipoprotein M | 146 | O95445 |
| B2M | Beta-2-microglobulin | 147 | P61769 |
| FINC | Fibronectin | 148 | P02751 |
| TTR | Transthyretin | 149 | P02766 |
| SHBG | Sex hormone-binding globulin | 150 | P04278 |
| TRFE | Serotransferrin | 151 | P02787 |
| VTNC | Vitronectin | 152 | P04004 |

[0870] Table 21 identifies and defines the glycan structures included in Table 16, all of which are N-glycans. Table 21 identifies a coded representation of the composition for each glycan structure included in Table 16. As used herein, the 4-digit GL NO. is a designation that represents the number of hexoses, the number of HexNAcs, the number of Fucoses, and the number of Neuraminic Acids.

TABLE 21
Glycan Structure GL NOS: Composition

| Glycan Structure | | | |
|---|---|---|---|
| GL NO. | Structure | Glycan Composition | Mass |
| 5412 | [symbol] | Hex(5)HexNAc(4)Fuc(1)NeuAc(2) | 2368.840798 |
| 6512 | [symbol] | Hex(6)HexNAc(5)Fuc(1)NeuAc(1) | 2733.972986 |
| 5402 | [symbol] | Hex(5)HexNAc(4)Fuc(0)NeuAc(2) | 2222.782892 |
| 5200 | [symbol] | Hex(5)HexNAc(2)Fuc(0)NeuAc(0) | 1234.433336 |
| 5401 | [symbol] | Hex(5)HexNAc(4)Fuc(0)NeuAc(1) | 1931.687482 |
| 6301 | [symbol] | Hex(6)HexNAc(3)Fuc(0)NeuAc(1) | 1890.660934 |
| 6512 | [symbol] | Hex(6)HexNAc(5)Fuc(1)NeuAc(1) | 2733.972986 |
| 7614 | [symbol] | Hex(7)HexNAc(6)Fuc(1)NeuAc(4) | 3681.295994 |
| 7601 | [symbol] | Hex(7)HexNAc(6)Fuc(0)NeuAc(1) | 2661.951858 |
| 6503 | [symbol] | Hex(6)HexNAc(5)Fuc(0)NeuAc(3) | 2879.01049 |
| 6502 | [symbol] | Hex(6)HexNAc(5)Fuc(0)NeuAc(2) | 2587.91508 |
| 6513 | [symbol] | Hex(6)HexNAc(5)Fuc(1)NeuAc(3) | 3025.068396 |
| 3500 | [symbol] | Hex(3)HexNAc(5)Fuc(0)NeuAc(0) | 1519.5658 |
| 3410 | [symbol] | Hex(3)HexNAc(4)Fuc(1)NeuAc(0) | 1462.544338 |
| 3510 | [symbol] | Hex(3)HexNAc(5)Fuc(1)NeuAc(0) | 1665.623706 |
| 9200 | [symbol] | Hex(9)HexNAc(2)Fuc(0)NeuAc(0) | 1882.644616 |

Legend for Table 21:

| | | | | |
|---|---|---|---|---|
| ● | [symbol] | [symbol] | [symbol] | [symbol] |
| Glc | Gal | Man | Fuc | Neu5Ac |
| ▪ | [symbol] | [symbol] | [symbol] | [symbol] |
| GlcNAc | GlcNAc | ManNAc | Xyl | Neu5Gc |
| [symbol] | [symbol] | [symbol] | | [symbol] |
| GlcN | GalN | ManN | | Kdn |
| [symbol] | [symbol] | [symbol] | [symbol] | |
| GlcA | GalA | ManA | IdoA | |

[0871] Aspects of the disclosure include kits comprising one or more compositions, each comprising one or more peptide structures of the disclosure that can be used as assay standards, and instructions for use. Kits in accordance with one or more embodiments described herein may include a label indicating the intended use of the contents of the kit. The term “label” as used herein with respect to a kit includes any writing, or recorded material supplied on or with a kit, or that otherwise accompanies a kit.

[0872] The peptide structures and the transitions produced therefrom, as described herein, may be useful for diagnosing and treating a PC disease state. A transition includes a precursor ion and at least one product ion grouping. As reviewed herein, the peptide structures in Table 16, as well as their corresponding precursor ion and product ion groupings (these ions having defined m/z ratios or m/z ratios that fall within the m/z ranges identified herein), can be used in mass spectrometry-based analyses to diagnose and facilitate treatment of diseases, such as, for example, PC.

[0873] Aspects of the disclosure include methods for analyzing one or more peptide structures, as described herein. In some embodiments, the methods involve processing a sample from a patient to generate a prepared sample that can be inputted into a mass spectrometry system (e.g., a reaction monitoring mass spectrometry system). In certain embodiments, processing the sample can comprise performing one or more of: a denaturation procedure, a reduction procedure, an alkylation procedure, and a digestion procedure. The denaturation and reduction procedures may be implemented in a manner similar to, for example, denaturation and reduction 202 in FIG. 2. The alkylation procedure may be implemented in a manner similar to, for example, alkylation procedure 204 in FIG. 2. The digestion procedure may be implemented in a manner similar to, for example, digestion procedure 206 in FIG. 2.

[0874] In some embodiments, the methods for analyzing one or more peptide structures involve detecting a set of product ions generated by a reaction monitoring mass spectrometry system in which one or more product ions may correspond to each of the one or more peptide structures that have been inputted into the mass spectrometry system. As described herein, each peptide structure can be converted into a set of product ions having a defined m/z ratio, as provided in Table 18 or an m/z ratio within an identified m/z ratio as provided in Table 18. In some embodiments, the methods involve generating quantification (e.g., abundance) data for the one or more product ions detected using the reaction monitoring mass spectrometry system.

[0875] In some embodiments, the methods further comprise generating a diagnosis output using the quantification data and a model that has been trained using supervised or unsupervised machine learning. In certain embodiments, the reaction monitoring mass spectrometry system may include multiple/selected reaction monitoring mass spectrometry (MRM/SRM-MS) to detect the one or more product ions and generate the quantification data.

### VIII.A. Compositions and Kits—NSCLC

[0876] Provided herein are compositions comprising one or more peptide structures from Table 35. Provided herein are compositions comprising one or more glycopeptides from Table 35. In some embodiments, provided herein is a composition comprising two or more peptide structures from Table 35. In some embodiments, provided herein is a composition comprising three or more peptide structures from Table 35. In some embodiments, provided herein is a composition comprising four or more peptide structures from Table 35. In some embodiments, provided herein is a composition comprising five or more peptide structures from Table 35. In some embodiments, provided herein is a composition comprising 10 or more peptide structures from Table 35. In some embodiments, provided herein is a composition comprising 15 or more peptide structures from Table 35. In some embodiments, provided herein is a composition comprising 20 or more peptide structures from Table 35. In some embodiments, provided herein is a composition comprising 25 or more peptide structures from Table 35. In some embodiments, the composition is from a biological sample. In some embodiments, the composition comprises one or more purified peptide structures. In some embodiments, the composition comprises one or more purified glycopeptides. In some embodiments, the composition comprises enzymatically digested peptide and/or glycopeptide fragments, such as those in Table 35. In some embodiments, the composition comprises enzymatically digested glycopeptide fragments, such as those in Table 35. In some embodiments, the composition comprises at least one, at least two, at least three, at least four, at least five, at least 10, at least 15, at least 20, or at least 25 peptides and/or glycopeptides comprising a sequence set forth in SEQ ID NOs: 224-296 along with the associated glycan set forth in Table 35.

[0877] In some embodiments, provided herein is a composition comprising one or more peptide structures from Table 40. In some embodiments, provided herein is a composition comprising one or more glycopeptides from Table 40. In some embodiments, provided herein is a composition comprising two or more peptide structures from Table 40. In some embodiments, provided herein is a composition comprising three or more peptide structures from Table 40. In some embodiments, provided herein is a composition comprising four or more peptide structures from Table 40. In some embodiments, provided herein is a composition comprising five or more peptide structures from Table 40. In some embodiments, provided herein is a composition comprising 10 or more peptide structures from Table 40. In some embodiments, provided herein is a composition comprising 15 or more peptide structures from Table 40. In some embodiments, the composition is from a biological sample. In some embodiments, the composition comprises one or more purified peptide structures. In some embodiments, the composition comprises one or more purified glycopeptides. In some embodiments, the composition comprises enzymatically digested peptide fragments, such as those in Table 40. In some embodiments, the composition comprises enzymatically digested glycopeptide fragments, such as those in Table 40. In some embodiments, the composition comprises at least one, at least two, at least three, at least four, at least five, at least 10, or at least 15 peptides and/or glycopeptides comprising a sequence set forth in SEQ ID NOs: 229, 231-234, 236, 239, 241, 244-245, 247-255 along with the associated glycan set forth in Table 35.

[0878] In some embodiments, provided herein is a composition comprising at least one peptide and/or glycopeptide comprising a sequence set forth in SEQ ID NOs: 224-296 along with the associated glycan set forth in Table 35. In some embodiments, provided herein is a composition comprising at least two peptides and/or glycopeptides comprising a sequence set forth in SEQ ID NOs: 224-296 along with the associated glycan set forth in Table 35. In some embodiments, provided herein is a composition comprising at least three peptides and/or glycopeptides comprising a sequence set forth in SEQ ID NOs: 224-296 along with the associated glycan set forth in Table 35. In some embodiments, provided herein is a composition comprising at least four peptides and/or glycopeptides comprising a sequence set forth in SEQ ID NOs: 224-296 along with the associated glycan set forth in Table 35. In some embodiments, provided herein is a composition comprising at least five peptides and/or glycopeptides comprising a sequence set forth in SEQ ID NOs: 224-296 along with the associated glycan set forth in Table 35. In some embodiments, provided herein is a composition comprising at least 10 peptides and/or glycopeptides comprising a sequence set forth in SEQ ID NOs: 224-296 along with the associated glycan set forth in Table 35. In some embodiments, provided herein is a composition comprising at least 15 peptides and/or glycopeptides comprising a sequence set forth in SEQ ID NOs: 224-296 along with the associated glycan set forth in Table 35. In some embodiments, provided herein is a composition comprising 20 peptides and/or glycopeptides comprising sequences set forth in SEQ ID NOs: 224-296 along with the associated glycan set forth in Table 35. In some embodiments, provided herein is a composition comprising 25 peptides and/or glycopeptides comprising sequences set forth in SEQ ID NOs: 224-296 along with the associated glycan set forth in Table 35.

[0879] In some embodiments, provided herein are peptides and/or glycopeptides set forth in Table 35. In some embodiments, provided herein are glycopeptides set forth in Table 35. In some embodiments, provided herein are peptides and/or glycopeptides comprising a sequence set forth in SEQ ID NOs: 224-296 along with the associated glycan set forth in Table 35.

[0880] In some embodiments, provided herein is a composition comprising at least one peptide and/or glycopeptides comprising a sequence set forth in SEQ ID NOs: 229, 231-234, 236, 239, 241, 244-245, 247-255 along with the associated glycan set forth in Table 35. In some embodiments, provided herein is a composition comprising at least two peptides and/or glycopeptides comprising a sequence set forth in SEQ ID NOs: 229, 231-234, 236, 239, 241, 244-245, 247-255 along with the associated glycan set forth in Table 35. In some embodiments, provided herein is a composition comprising at least three peptides and/or glycopeptides comprising a sequence set forth in SEQ ID NOs: 229, 231-234, 236, 239, 241, 244-245, 247-255 along with the associated glycan set forth in Table 35. In some embodiments, provided herein is a composition comprising at least four peptides and/or glycopeptides comprising a sequence set forth in SEQ ID NOs: 229, 231-234, 236, 239, 241, 244-245, 247-255 along with the associated glycan set forth in Table 35. In some embodiments, provided herein is a composition comprising at least five peptides and/or glycopeptides comprising a sequence set forth in SEQ ID NOs: 229, 231-234, 236, 239, 241, 244-245, 247-255 along with the associated glycan set forth in Table 35. In some embodiments, provided herein is a composition comprising at least 10 peptides and/or glycopeptides comprising a sequence set forth in SEQ ID NOs: 229, 231-234, 236, 239, 241, 244-245, 247-255 along with the associated glycan set forth in Table 35. In some embodiments, provided herein is a composition comprising at least 15 peptides and/or glycopeptides comprising a sequence set forth in SEQ ID NOs: 229, 231-234, 236, 239, 241, 244-245, 247-255 along with the associated glycan set forth in Table 35.

[0881] In some embodiments, provided herein are peptides and/or glycopeptides set forth in Table 40. In some embodiments, provided herein are glycopeptides set forth in Table 40. In some embodiments, provided herein are peptides and/or glycopeptides comprising a sequence set forth in SEQ ID NOs: 229, 231-234, 236, 239, 241, 244-245, 247-255 along with the associated glycan set forth in Table 35.

[0882] Also provided herein are kits for detecting NSCLC in an individual and kits for treating NSCLC in an individual. In some embodiments, the kit comprises at least one agent for quantifying at least one peptide structure identified in Table 35. In some embodiments, the kit comprises at least one agent for quantifying at least one peptide structure comprising the amino acid sequence of SEQ ID NOs: 224-296 along with the associated glycan set forth in Table 35. In some embodiments, the kit comprises at least one agent for quantifying at least one peptide structure identified in Table 40. In some embodiments, the kit comprises at least one agent for quantifying at least one peptide structure comprising the amino acid sequence of SEQ ID NOs: 229, 231-234, 236,239, 241, 244-245,247-255 along with the associated glycan set forth in Table 35. In some embodiments, the kit comprises at least one agent for quantifying at least one peptide structure, wherein the agent is from a biological sample, is one or more purified peptide structures, and/or comprises enzymatically digested peptide and/or glycopeptide fragments. In some embodiments, the kit comprises instructions for detecting one or more biomarkers provided herein, wherein the biomarker is at least one peptide structure identified in Table 35. In some embodiments, the kit comprises instructions for detecting one or more biomarkers provided herein, wherein the biomarker is at least one glycopeptide identified in Table 35. In some embodiments, the kit comprises instructions for detecting one or more biomarkers provided herein, wherein the biomarker is at least one peptide structure comprising the amino acid sequence of SEQ ID NOs: 224-296 along with the associated glycan set forth in Table 35. In some embodiments, the kit comprises instructions for detecting one or more biomarkers provided herein, wherein the biomarker is at least one peptide structure identified in Table 40. In some embodiments, the kit comprises instructions for detecting one or more biomarkers provided herein, wherein the biomarker is at least one peptide structure comprising the amino acid sequence of SEQ ID NOs: 229, 231-234, 236, 239, 241, 244-245, 247-255 along with the associated glycan set forth in Table 35. In some embodiments, the kit comprises reagents for detecting one or more biomarkers described herein. In some embodiments, the kit comprises at least one agent for quantifying at least one peptide structure identified in Table 35 to carry out part or all of any one or more of the methods disclosed herein. In some embodiments, the kit comprises at least one agent for quantifying at least one peptide structure comprising the amino acid sequence of SEQ ID NOs: 224-296 along with the associated glycan set forth in Table 35 to carry out part or all of any one or more of the methods disclosed herein. In some embodiments, the kit comprises at least one agent for quantifying at least one peptide structure identified in Table 40 to carry out part or all of any one or more of the methods disclosed herein. In some embodiments, the kit comprises at least one agent for quantifying at least one peptide structure comprising the amino acid sequence of SEQ ID NOs: 229, 231-234, 236,239, 241, 244-245,247-255 along with the associated glycan set forth in Table 35 to carry out part or all of any one or more of the methods disclosed herein.

[0883] In some embodiments, the kit comprises at least one of a peptide standard, a glycopeptide standard, a buffer, and at least one or more peptide sequences to carry out part or all of any one or more of the methods disclosed herein. In some embodiments, the kit comprises at least one of a peptide standard, a glycopeptide standard, a buffer, and at least one or more glycopeptide sequences to carry out part or all of any one or more of the methods disclosed herein. In some embodiments, the one or more peptide and/or glycopeptide sequences are identified in Table 35. In some embodiments, the one or more peptide and/or glycopeptide sequences comprise the amino acid sequence of SEQ ID NOs: 224-296 along with the associated glycan set forth in Table 35. In some embodiments, the one or more peptide and/or glycopeptide sequences are identified in Table 40. In some embodiments, the one or more peptide and/or glycopeptide sequences comprise the amino acid sequence of SEQ ID NOs: 229, 231-234, 236, 239, 241, 244-245, 247-255 along with the associated glycan set forth in Table 35. In some embodiments, the kit comprises instructions for detecting NSCLC in an individual. In some embodiments, the kit comprises instructions for diagnosing NSCLC in an individual. In some embodiments, the kit comprises instructions for use according to any of the methods provided herein.

[0884] In some embodiments, the kit comprises instructions for selecting a treatment for the individual having NSCLC. In some embodiments, the kit comprises instructions for administering a treatment to the individual having NSCLC.

[0885] In some embodiments, the kit comprises reagents and instructions for selecting a treatment for an individual with NSCLC, wherein the treatment is one or more NSCLC treatments described herein. In some embodiments, the kit comprises reagents and instructions for administering the treatment to an individual with NSCLC comprising administering to the individual one or more NSCLC treatments described herein. In some embodiments, the kit comprises reagents and instructions for treating an individual diagnosed with NSCLC comprising selecting one or more NSCLC treatments described herein and/or administering to the individual one or more NSCLC treatments described herein. In some embodiments, the kit comprises instructions for use according to any of the methods provided herein.

### VIII.B. Peptide Structure and Product Ion Compositions and Kits—Ovarian Cancer

[0886] Aspects of the disclosure include compositions comprising one or more of the peptide structures listed in Table 41, in Table 42, in Table 43A, in Table 43B, in Table 43C, or in Table 43D. In some embodiments, a composition comprises a plurality of the peptide structures listed in Table 41, a plurality of the peptide structures listed in Table 42, or a plurality of the peptide structures listed in Table 43A. In some embodiments, a composition comprises 1, 2, 3, 4, 5, 6, 7, 8, 9, 10, 11, 12, 13, 14, 15, 16, 17, 18, 19, 20, 21, 22, 23, 24, 25, 26, 27, 28, 29, 30, 31, 32, 33, 34, 35, 36, 37, 38, 39, 40, 412, 42, 43, 44, 45, 46, 47, 48, 49, 50, 51, 52, 53, 54, 55, 56, 57, 58, 59, 60, 61, 62, 63, 64, 65, 66, 67, 68, 69, 70, 71, 72, 73, 74, 75, 76, 77, 78, 79, 80, 81, 82, 83, 84, 85, 86, 87, 88, 89, or 90 of the peptide structures listed in Tables 41, 42, 43A, 43B, 43C, and 43D. In one or more embodiments, a composition comprises 1, 2, 3, 4, 5, 6, 7, 8, 9, 10, 11, 12, 13, 14, 15, 16, 17, 18, 19, 20, 21, 22, 23, 24, 25, 26, 27, 28, 29, 30, 31, 32, 33, 34, 35, or all 36 of the peptide structures listed in Table 43B. In one or more embodiments, a composition comprises 1, 2, 3, 4, 5, 6, 7, 8, 9, 10, 11, 12, 13, 14, 15, 16, 17, 18, 19, 20, 21, 22, 23, 24, or all 25 of the glycopeptide structures listed in Table 43C. In one or more embodiments, a composition comprises 1, 2, 3, 4, 5, 6, 7, 8, 9, 10, 11, 12, 13, 14, 15, 16, 17, 18, 19, 20, 21, 22, 23, 24, 25, 26, 27, 28, 29, 30, 31, 32, 33, 34, 35, 36, 37, 38, 39, 40, 41, 42, 43, 44, 45, 46, 47, 48, 49, or all 50 of the glycopeptide structures listed in Table 43D.

[0887] In some embodiments, a composition comprises a peptide structure having an amino acid sequence with at least 80% sequence identity, such as, for example, at least 81%, 82%, 83%, 84%, 85%, 86%, 87%, 88%, 89%, 90%, 91%, 92%, 93%, 94%, 95%, 96%, 97%, 98%, 99%, or 100% sequence identity to any one of SEQ ID NOs: 307-315, 428-443, 450-462, 465-474, 475-499, 500-549 listed in Tables 41, 42, 43A, 43B, 43C, and 43D.

[0888] Aspects of the disclosure include compositions comprising one or more precursor ions having a defined charge and/or defined mass-to-charge (m/z) ratio, as listed in Tables 44A, 44B, and 44C. Aspects of the disclosure include compositions comprising one or more product ions having a defined mass-to-charge (m/z) ratio, which product ions are produced by converting a peptide structure described herein (e.g., a peptide structure listed in Tables 41, 42, 43A, 43B, 43C, or 43D) into a gas phase ion in a mass spectrometry system. Conversion of the peptide structure into a gas phase ion can take place using any of a variety of techniques, including, but not limited to, matrix assisted laser desorption ionization (MALDI); electron ionization (EI); electrospray ionization (ESI); atmospheric pressure chemical ionization (APCI); and/or atmospheric pressure photo ionization (APPI).

[0889] Aspects of the disclosure include compositions comprising one or more product ions produced from one or more of the peptide structures described herein (e.g., a peptide structure listed in Tables 41, 42, 43A, 43B, 43C, or 43D). In some embodiments, a composition comprises a set of the product ions listed in Table 44A, 44B, or 44C having an m/z ratio selected from the list provided for each peptide structure in Table 44A, 44B, and 44C.

[0890] In some embodiments, a composition comprises at least one of peptide structures PS-165 to PS-174 identified in Table 41. In some embodiments, a composition comprises at least one of peptide structures PS-175 to PS-198 and PS-169 identified in Table 42. In some embodiments, a composition comprises at least one of peptide structures PS-165, PS-169, PS-175, PS-179, PS-184, PS-189, PS-192, PS-193, PS-194, PS-195, PS-196, and PS-199 to PS-225 identified in Table 43A. In some embodiments, a composition comprises at least one of peptide structures PS-168, PS-172, PS-182, PS-200, PS-201, PS-205, PS-220, PS-226 to PS-254 identified in Table 43B. In some embodiments, a composition comprises at least one of peptide structures of SEQ ID NOS 475-499 identified in Table 43C. In some embodiments, a composition comprises at least one of peptide structures of PS-ID 280 to 329 identified in Table 43D.

[0891] In one or more embodiments, a composition comprises at least 1, at least 2, at least 3, at least 4, at least 5, at least 6, at least 7, at least 8, at least 9, or all 10 of the peptide structures PS-165 to PS-174 identified in Table 41. In one or more embodiments, a composition comprises at least 1, at least 2, at least 3, at least 4, at least 5, at least 6, at least 7, at least 8, at least 9, at least 10, at least 11, at least 12, at least 13, at least 14, at least 15, at least 16, at least 17, at least 18, at least 19, at least 20, at least 21, at least 22, at least 23, at least 23, at least 24, or all 25 of the peptide structures PS-175 to PS-198 and PS-169 identified in Table 42. In one or more embodiments, a composition comprises at least 1, at least 2, at least 3, at least 4, at least 5, at least 6, at least 7, at least 8, at least 9, at least 10, at least 11, at least 12, at least 13, at least 14, at least 15, at least 16, at least 17, at least 18, at least 19, at least 20, at least 21, at least 22, at least 23, at least 23, at least 24, at least 25, at least 26, at least 27, at least 28, at least 29, at least 30, at least 31, at least 32, at least 33, at least 34, at least 35, at least 36, at least 37, or all 38 of the peptide structures PS-165, PS-169, PS-175, PS-179, PS-184, PS-189, PS-192, PS-193, PS-194, PS-195, PS-196, and PS-199 to PS-225 identified in Table 43A. In some embodiments, the at least 3 peptide structures additionally include at least 1, at least 2, at least 3, at least 4, at least 5, at least 6, or all 7 of the remaining peptide structures PS-165, PS-169, PS-175, PS-179, PS-184, PS-189, PS-192, PS-193, PS-194, PS-195, PS-196, and PS-199 to PS-225 identified in Table 43A. In one or more embodiments, a composition comprises at least 1, at least 2, at least 3, at least 4, at least 5, at least 6, at least 7, at least 8, at least 9, at least 10, at least 11, at least 12, at least 13, at least 14, at least 15, at least 16, at least 17, at least 18, at least 19, at least 20, at least 21, at least 22, at least 23, at least 23, at least 24, at least 25, at least 26, at least 27, at least 28, at least 29, at least 30, at least 31, at least 32, at least 33, at least 34, at least 35, or all 36 of the peptide structures PS-168, PS-172, PS-182, PS-200, PS-201, PS-206, PS-220, PS-226 to PS-254 identified in Table 43B. In one or more embodiments, a composition comprises at least 1, at least 2, at least 3, at least 4, at least 5, at least 6, at least 7, at least 8, at least 9, at least 10, at least 11, at least 12, at least 13, at least 14, at least 15, at least 16, at least 17, at least 18, at least 19, at least 20, at least 21, at least 22, at least 23, at least 23, at least 24, or all 25 of the peptide structures of SEQ ID NOS 495-499 identified in Table 43C. In one or more embodiments, a composition comprises at least 1, at least 2, at least 3, at least 4, at least 5, at least 6, at least 7, at least 8, at least 9, at least 10, at least 11, at least 12, at least 13, at least 14, at least 15, at least 16, at least 17, at least 18, at least 19, at least 20, at least 21, at least 22, at least 23, at least 24, at least 25, at least 26, at least 27, at least 28, at least 29, at least 30, at least 31, at least 32, at least 33, at least 34, at least 35, at least 36, at least 37, at least 38, at least 39, at least 40, at least 41, at least 42, at least 43, at least 44, at least 45, at least 46, at least 47, at least 48, at least 49, or all 50 of the peptide structures of SEQ ID NOS 500-549 identified in Table 43D.

[0892] In some embodiments, a composition comprises a peptide structure or a product ion. The peptide structure or product ion can include an amino acid sequence having at least 90% sequence identity to any one of SEQ ID NOS: 307-315, as identified in Table 45, corresponding to peptide structures PS-165 to PS-174 in Table 41. The peptide structure or product ion can include an amino acid sequence having at least 90% sequence identity to any one of SEQ ID NOS: 309, 311, 428-443, as identified in Table 45, corresponding to various ones of peptide structures PS-169 and PS-175 to PS-198 in Table 42. The peptide structure or product ion can include an amino acid sequence having at least 90% sequence identity to any one of SEQ ID NOS: 11, 14, 15, 31, 32, 33, 34, 37, 38, 40, 42, 44, 45, 46, 53-65307, 310, 311, 428-431, 434, 435, 437, 439, 441, 442, 443, 450-462, as identified in Table 45, corresponding to various ones of peptide structures PS-165, PS-169, PS-175, PS-179, PS-184, PS-189, PS-192, PS-193, PS-194, PS-195, PS-196, and PS-199 to PS-225 in Table 43A. The peptide structure or product ion can include an amino acid sequence having at least 90% sequence identity to any one of SEQ ID NOS: 310, 314, 429, 430, 434, 436, 439, 442, 451, 453, 457, 465, 466, 467, 468, 469, 470, 471, 472, 473, and 474, as identified in Table 45, corresponding to various ones of peptide structures PS-168, PS-172, PS-182, PS-200, PS-201, PS-205, PS-220, PS-226 to PS-254 in Table 43B. The peptide structure or product ion can include an amino acid sequence having at least 90% sequence identity to any one of SEQ ID NOS: 475-499, corresponding to various ones of peptide structures in Table 43C or product ions in Table 44B. The peptide structure or product ion can include an amino acid sequence having at least 90% sequence identity to any one of SEQ ID NOS: 500-549, as identified in Table 45, corresponding to various ones of peptide structures PS-280 to PS-329 in Table 43D.

[0893] In some embodiments, the product ion is selected as one from a group consisting of product ions identified in Tables 44A, 44B, and 44C including product ions falling within an identified m/z range of the m/z ratio identified in Tables 44A, 44B, and 44C and characterized as having a precursor ion having an m/z ratio within an identified m/z range of the m/z ratio identified in Tables 44A, 44B, and 44C. A first range for the product ion m/z ratio may be +0.5. A second range for the product ion m/z ratio may be ±0.8. A third range for the product ion m/z ratio may be ±1.0. A first range for the precursor ion m/z ratio may be ±1.0; a second range for the precursor ion m/z ratio may be (±1.5). Thus, a composition may include a product ion having an m/z ratio that falls within at least one of the first range (±0.5), the second range (±0.8), or the third range (1.0) of the product ion m/z ratio identified in Tables 44A, 44B, and 44C, and characterized as having a precursor ion having an m/z ratio that falls within at least one of first range (±0.5), a second range (±1.0), or a third range (±1.0 of the precursor ion m/z ratio identified in Tables 44A, 44B, and 44C.

TABLE 44A
Mass Spectrometry-Related Characteristics for the Peptide
Structures associated with Ovarian Cancer (e.g., EOC)

| | | | | | | 2^{nd} | |
|---|---|---|---|---|---|---|---|
| | | Collision | 1^{st} | 1^{st} | 1^{st} | Collision | 2^{nd} |
| PS-ID | RT | Energy | Precursor | Precursor | Product | Energy | Product |
| NO. | (min) | (V) | m/z | Charge | m/z | (V) | m/z |
| 165 | 10.6 | 30 | 1115.1 | 3 | 366.1 | 34 | 1341.6 |
| 166 | 35.8 | 35 | 1241.8 | 4 | 204.1 | 20 | 1152.6 |
| 167 | 6.6 | 25 | 1009.4 | 3 | 366.1 | N/A | N/A |
| 168 | 17.1 | 30 | 1226.2 | 4 | 366.1 | 30 | 1048.5 |
| 169 | 7.9 | 21 | 879 | 3 | 204.1 | 27 | 1392.6 |
| 170 | 40.5 | 35 | 1184.5 | 4 | 204.1 | N/A | N/A |
| 171 | 33.6 | 30 | 1440.3 | 4 | 366.1 | N/A | N/A |
| 172 | 13.3 | 35 | 1378.9 | 5 | 366.1 | N/A | N/A |
| 173 | 10.1 | 35 | 1237 | 2 | 204.1 | 20 | 1376.6 |
| 174 | 10.1 | 35 | 1237 | 2 | 204.1 | 20 | 1376.6 |
| 175 | 16.3 | 20 | 891.1 | 3 | 829.4 | 20 | 366.1 |
| 176 | 22.6 | 31 | 1250.3 | 4 | 366.1 | N/A | N/A |
| 177 | 30.2 | 28 | 1173.2 | 4 | 366.1 | 978.5 | 25 |
| 178 | 44 | 15 | 874.4 | 5 | 366.1 | 1183.6 | 20 |
| 179 | 31.3 | 30 | 1191.2 | 4 | 366.1 | 978.5 | 20 |
| 180 | 27.4 | 35 | 1084.2 | 4 | 204.1 | N/A | N/A |
| 181 | 12.6 | 28 | 1106.8 | 3 | 366.1 | N/A | N/A |
| 182 | 37.8 | 30 | 1082.6 | 5 | 274.1 | N/A | N/A |
| 183 | 16.7 | 20 | 1025.7 | 4 | 274.1 | 1048.5 | 25 |
| 184 | 43.3 | 34 | 1341 | 5 | 366.1 | 1299 | 34 |
| 185 | 22.6 | 30 | 1213.8 | 4 | 366.1 | N/A | N/A |
| 186 | 37.3 | 30 | 1336.3 | 4 | 366.1 | N/A | N/A |
| 187 | 13.1 | 13 | 935.8 | 3 | 204.1 | 1360.6 | 30 |
| 188 | 14.8 | 25 | 1021.4 | 4 | 366.1 | N/A | N/A |
| 189 | 5.7 | 29 | 1165.6 | 4 | 366.1 | 979.5 | 29 |
| 190 | 7.9 | 30 | 1224.5 | 2 | 366.1 | N/A | N/A |
| 191 | 18.5 | 33 | 1055.8 | 3 | 366.1 | 1453.6 | 35 |
| 192 | 23.5 | 20 | 1079.7 | 4 | 366.1 | N/A | N/A |
| 193 | 31 | 30 | 1144.9 | 4 | 366.1 | 1359.6 | 35 |
| 194 | 16.5 | 34 | 1117.2 | 4 | 366.1 | N/A | N/A |
| 195 | 43.5 | 22 | 1057 | 4 | 366.1 | 1184.1 | 28 |
| 196 | 41.5 | 22 | 1115.4 | 4 | 366.1 | 366.1 | 25 |
| 197 | 32.3 | 30 | 1217.7 | 4 | 366.1 | 1359.6 | 35 |
| 198 | 13.6 | 35 | 1087.1 | 3 | 204.1 | N/A | N/A |
| 199 | 24.3 | 23 | 942.4 | N/A | 366.1 | N/A | N/A |
| 200 | 31.1 | 34 | 1343.8 | N/A | 366.1 | N/A | N/A |
| 201 | 23.9 | 25 | 1116.9 | N/A | 366.1 | N/A | N/A |
| 202 | 31.3 | 15 | 590.3 | N/A | 725.4 | N/A | N/A |
| 203 | 34.2 | 25 | 1149.3 | N/A | 366.1 | N/A | N/A |
| 204 | 28 | 27 | 1085.4 | N/A | 366.1 | N/A | N/A |
| 205 | 33.8 | 27 | 1105.6 | N/A | 366.1 | N/A | N/A |
| 206 | 31.2 | 30 | 1314.9 | N/A | 366.1 | N/A | N/A |
| 207 | 34.4 | 25 | 819.1 | N/A | 855.5 | N/A | N/A |
| 208 | 31 | 25 | 1035.6 | N/A | 366.1 | N/A | N/A |
| 209 | 5.6 | 25 | 1256.8 | N/A | 366.1 | N/A | N/A |
| 210 | 26.4 | 20 | 1252.5 | N/A | 366.1 | N/A | N/A |
| 211 | 31 | 33 | 1335.3 | N/A | 366.1 | N/A | N/A |
| 212 | 8.1 | 20 | 1054.7 | N/A | 366.1 | N/A | N/A |
| 213 | 40.3 | 29 | 944.5 | N/A | 1269.6 | N/A | N/A |
| 214 | 13.1 | 25 | 1043.8 | N/A | 366.1 | N/A | N/A |
| 215 | 5.8 | 34 | 1335 | N/A | 366.1 | N/A | N/A |
| 216 | 13.2 | 25 | 927.7 | N/A | 366.1 | N/A | N/A |
| 217 | 33 | 25 | 1018.1 | N/A | 366.1 | N/A | N/A |
| 218 | 27.4 | 25 | 1012.7 | N/A | 366.1 | N/A | N/A |
| 219 | 13.2 | 15 | 989.9 | N/A | 204.1 | N/A | N/A |
| 220 | 38.6 | 35 | 1214.1 | N/A | 274.1 | N/A | N/A |
| 221 | 40 | 20 | 693.9 | N/A | 675.4 | N/A | N/A |
| 222 | 30.4 | 26 | 1070.4 | N/A | 366.1 | N/A | N/A |
| 223 | 23 | 20 | 988.8 | N/A | 274.1 | N/A | N/A |
| 224 | 15.7 | 12 | 453.2 | N/A | 532.2 | N/A | N/A |
| 225 | 37.5 | 25 | 1116.9 | N/A | 366.1 | N/A | N/A |
| 226 | 37.9 | 30 | 1053.4 | 5 | 274.1 | N/A | N/A |
| 227 | 38.3 | 30 | 1184.9 | 5 | 274.1 | N/A | N/A |
| 228 | 30.8 | 35 | 1441.6 | 3 | 366.1 | 30 | 978.5 |
| 229 | 5.8 | 30 | 1213.3 | 3 | 366.1 | 30 | 979.5 |
| 230 | 5.7 | 32 | 1262 | 3 | 366.1 | 32 | 979.5 |
| 231 | 5.4 | 31 | 1238 | 3 | 366.1 | 31 | 979.5 |
| 232 | 5.9 | 27 | 1110.8 | 4 | 366.1 | 27 | 979.5 |
| 233 | 23.4 | 25 | 1195.3 | 4 | 366.1 | N/A | N/A |
| 234 | 23.3 | 31 | 1231.8 | 4 | 274.1 | N/A | N/A |
| 235 | 23.1 | 33 | 1323.1 | 4 | 366.1 | N/A | N/A |
| 236 | 5.4 | 35 | 1220.1 | 3 | 274.1 | 35 | 999.4 |
| 237 | 5.3 | 33 | 1268.8 | 3 | 274.1 | 33 | 999.4 |
| 238 | 37.7 | 30 | 1196.5 | 4 | 366.1 | 20 | 1062.5 |
| 239 | 37.5 | 25 | 1287.8 | 4 | 366.1 | 25 | 1062.5 |
| 240 | 4.6 | 33 | 1257.5 | 3 | 366.1 | 33 | 965.5 |
| 241 | 19.6 | 25 | 1028.9 | 4 | 274.1 | 25 | 1453.6 |
| 242 | 27.5 | 35 | 1284.8 | 4 | 204.1 | N/A | N/A |
| 243 | 20.8 | 30 | 1258.5 | 4 | 274.1 | 30 | 1113 |
| 244 | 27.7 | 29 | 1159.5 | 4 | 366.1 | 25 | 274.1 |
| 245 | 21.6 | 30 | 1067.7 | 4 | 366.1 | N/A | N/A |
| 246 | 21.5 | 25 | 1104.2 | 4 | 274.1 | N/A | N/A |
| 247 | 34.5 | 28 | 1138.4 | 5 | 366.1 | 35 | 1441.7 |
| 248 | 13.2 | 31 | 1247.7 | 5 | 366.1 | N/A | N/A |
| 249 | 13.4 | 34 | 1335.1 | 5 | 366.1 | N/A | N/A |
| 250 | 30.9 | 30 | 1201.5 | 4 | 366.1 | N/A | N/A |
| 251 | 30.7 | 32 | 1292.8 | 4 | 366.1 | 32 | 999.5 |
| 252 | 16.9 | 25 | 1106.4 | 4 | 274.1 | N/A | N/A |
| 253 | 23.1 | 20 | 1074.4 | 4 | 274.1 | N/A | N/A |
| 254 | 37.7 | 25 | 1127.9 | 5 | 366.1 | N/A | N/A |

TABLE 44B
Mass Spectrometry-Related Characteristics for the Peptide Structures associated
with Ovarian Cancer (e.g., EOC) - in accordance with Table 43C

| SEQ | | Collision | 1st | 1st | 2nd | 2nd | 1st | 2nd |
|---|---|---|---|---|---|---|---|---|
| ID | RT | Energy | Precursor | Precursor | Precursor | Precursor | Product | Product |
| NO | (min) | (V) | m/z | Charge | m/z | Charge | m/z | m/z |
| 475 | 30.6 | 30 | 1118.2 | 4 | 1118.2 | 4 | 366.1 | 978.5 |
| 476 | 5.8 | 30 | 1213.3 | 3 | 1213.3 | 3 | 366.1 | 979.5 |
| 477 | 5.7 | 32 | 1262 | 3 | 1262 | 3 | 366.1 | 979.5 |
| 478 | 5.9 | 27 | 1110.8 | 4 | 1110.8 | 4 | 366.1 | 979.5 |
| 479 | 23.3 | 31 | 1231.8 | 4 | n/a | n/a | 274.1 | n/a |
| 480 | 23.8 | 27 | 1087.7 | 5 | n/a | n/a | 366.1 | n/a |
| 481 | 23.1 | 33 | 1323.1 | 4 | n/a | n/a | 366.1 | n/a |
| 482 | 23.8 | 25 | 1116.9 | 5 | 1116.9 | 5 | 366.1 | 1060 |
| 483 | 5.4 | 35 | 1220.1 | 3 | 1220.1 | 3 | 274.1 | 999.4 |
| 484 | 37.7 | 30 | 1196.5 | 4 | 1196.5 | 4 | 366.1 | 1062.5 |
| 485 | 37.8 | 30 | 1360.5 | 4 | 1360.5 | 4 | 366.1 | 1062.5 |
| 486 | 41.3 | 32 | 1283.7 | 5 | 1283.7 | 5 | 366.1 | 1550.3 |
| 487 | 41.2 | 27 | 1313.1 | 5 | 1313.1 | 5 | 366.1 | 1550.3 |
| 488 | 13.1 | 25 | 1083.4 | 4 | n/a | n/a | 274.1 | n/a |
| 489 | 20.8 | 30 | 1258.5 | 4 | 1258.5 | 4 | 274.1 | 1113 |
| 490 | 21.6 | 30 | 1067.7 | 4 | n/a | n/a | 366.1 | n/a |
| 491 | 34.5 | 28 | 1138.4 | 5 | 1138.4 | 5 | 366.1 | 1441.7 |
| 492 | 13.4 | 34 | 1335.1 | 5 | n/a | n/a | 366.1 | n/a |
| 493 | 13.3 | 35 | 1378.9 | 5 | n/a | n/a | 366.1 | n/a |
| 494 | 31.1 | 29 | 1165 | 4 | n/a | n/a | 366.1 | n/a |
| 495 | 30.9 | 30 | 1201.5 | 4 | n/a | n/a | 366.1 | n/a |
| 496 | 30.7 | 32 | 1292.8 | 4 | 1292.8 | 4 | 366.1 | 999.5 |
| 497 | 16.9 | 25 | 1106.4 | 4 | n/a | n/a | 274.1 | n/a |
| 498 | 23.1 | 20 | 1074.4 | 4 | n/a | n/a | 274.1 | n/a |
| 499 | 33.2 | 27 | 1105.6 | 5 | 1105.6 | 5 | 366.1 | 1359.6 |

TABLE 44C
Mass Spectrometry-Related Characteristics for the Peptide Structures associated
with Ovarian Cancer (e.g., EOC) - in accordance with Table 43D

| | | Collision | 1st | 1st | 2nd | 2nd | 1st | 2nd |
|---|---|---|---|---|---|---|---|---|
| SEQ | RT | Energy | Precursor | Precursor | Precursor | Precursor | Product | Product |
| ID NO | (min) | (V) | m/z | Charge | m/z | Charge | m/z | m/z |
| 500 | 42.7 | 30 | 1282.9 | 5 | N/A | N/A | 366.1 | 1299 |
| 501 | 43.4 | 27 | 1111.7 | 4 | N/A | N/A | 366.1 | 1183.6 |
| 502 | 43.3 | 23 | 1148.3 | 4 | N/A | N/A | 366.1 | 1183.6 |
| 503 | 37.9 | 30 | 1053.4 | 5 | N/A | N/A | 274.1 | N/A |
| 504 | 38.3 | 30 | 1184.9 | 5 | N/A | N/A | 274.1 | N/A |
| 505 | 38.3 | 35 | 1214.1 | 5 | N/A | N/A | 274.1 | N/A |
| 506 | 30.8 | 35 | 1441.6 | 3 | N/A | N/A | 366.1 | 978.5 |
| 507 | 31.4 | 25 | 1154.7 | 4 | N/A | N/A | 274.1 | 978.5 |
| 508 | 5.4 | 35 | 1220.1 | 3 | N/A | N/A | 274.1 | 999.4 |
| 509 | 41 | 28 | 1152.7 | 5 | N/A | N/A | 366.1 | 1550.3 |
| 510 | 41 | 29 | 1181.9 | 5 | N/A | N/A | 366.1 | 1550.3 |
| 511 | 40.9 | 30 | 1568.4 | 4 | 1254.9 | 5 | 366.1 | 366.1 |
| 512 | 41.2 | 27 | 1313.1 | 5 | N/A | N/A | 366.1 | 1550.3 |
| 513 | 37.7 | 30 | 1196.5 | 4 | N/A | N/A | 366.1 | 1062.5 |
| 514 | 37.5 | 25 | 1287.8 | 4 | N/A | N/A | 366.1 | 1062.5 |
| 515 | 37.8 | 30 | 1360.5 | 4 | N/A | N/A | 366.1 | 1062.5 |
| 516 | 5.8 | 30 | 1213.3 | 3 | N/A | N/A | 366.1 | 979.5 |
| 517 | 5.7 | 32 | 1262 | 3 | N/A | N/A | 366.1 | 979.5 |
| 518 | 5.4 | 31 | 1238 | 3 | N/A | N/A | 366.1 | 979.5 |
| 519 | 5.9 | 26 | 1074.3 | 4 | N/A | N/A | 366.1 | 979.5 |
| 520 | 5.9 | 27 | 1110.8 | 4 | N/A | N/A | 366.1 | 979.5 |
| 521 | 23.4 | 25 | 1195.3 | 4 | N/A | N/A | 366.1 | N/A |
| 522 | 22.6 | 30 | 1213.8 | 4 | N/A | N/A | 366.1 | N/A |
| 523 | 23.2 | 25 | 1286.6 | 4 | N/A | N/A | 366.1 | N/A |
| 524 | 23.8 | 27 | 1087.7 | 5 | N/A | N/A | 366.1 | N/A |
| 525 | 22.6 | 31 | 1250.3 | 4 | N/A | N/A | 366.1 | N/A |
| 526 | 23.1 | 33 | 1323.1 | 4 | N/A | N/A | 366.1 | N/A |
| 527 | 23.8 | 25 | 1116.9 | 5 | N/A | N/A | 366.1 | 1060 |
| 528 | 4.8 | 30 | 1208.6 | 3 | N/A | N/A | 366.1 | 965.5 |
| 529 | 4.6 | 33 | 1257.5 | 3 | N/A | N/A | 366.1 | 965.5 |
| 530 | 4.8 | 29 | 1070.7 | 4 | N/A | N/A | 366.1 | 965.5 |
| 531 | 13.1 | 25 | 1083.4 | 4 | N/A | N/A | 274.1 | N/A |
| 532 | 19.1 | 30 | 1201.5 | 3 | N/A | N/A | 274.1 | 1453.6 |
| 533 | 27.5 | 35 | 1284.8 | 4 | N/A | N/A | 204.1 | N/A |
| 534 | 20.8 | 25 | 1222 | 4 | N/A | N/A | 274.1 | 1113 |
| 535 | 27.7 | 29 | 1159.5 | 4 | N/A | N/A | 366.1 | 274.1 |
| 536 | 27.6 | 30 | 1196 | 4 | N/A | N/A | 366.1 | 274.1 |
| 537 | 30.4 | 34 | 1343.8 | 4 | N/A | N/A | 366.1 | N/A |
| 538 | 21.6 | 30 | 1067.7 | 4 | N/A | N/A | 366.1 | N/A |
| 539 | 21.5 | 25 | 1104.2 | 4 | N/A | N/A | 274.1 | N/A |
| 540 | 34.5 | 28 | 1138.4 | 5 | N/A | N/A | 366.1 | 1441.7 |
| 541 | 13.2 | 31 | 1247.7 | 5 | N/A | N/A | 366.1 | N/A |
| 542 | 13.1 | 32 | 1276.9 | 5 | N/A | N/A | 366.1 | N/A |
| 543 | 13.4 | 34 | 1335.1 | 5 | N/A | N/A | 366.1 | N/A |
| 544 | 13.3 | 35 | 1378.9 | 5 | N/A | N/A | 366.1 | N/A |
| 545 | 28.9 | 25 | 1055.7 | 4 | N/A | N/A | 366.1 | 999.5 |
| 546 | 30 | 28 | 1128.8 | 4 | N/A | N/A | 366.1 | N/A |
| 547 | 30.9 | 30 | 1201.5 | 4 | N/A | N/A | 366.1 | N/A |
| 548 | 30.7 | 32 | 1292.8 | 4 | N/A | N/A | 366.1 | 999.5 |
| 549 | 23.1 | 20 | 1074.4 | 4 | N/A | N/A | 274.1 | N/A |

[0894] Tables 44A, 44B, and 44C show various parameters associated with the identification of the peptide and glycopeptides using LC and MRM-MS. The retention time (RT) represents the amount of time in minutes for the peptide elute from the chromatography column. The collision energy represents the energy applied to the peptide for creating fragments (i.e., product ions) such as, for example, in the 2^{nd} quadrupole of the triple quadrupole MS. The first precursor m/z represents a ratio value associated with an ionized form having a first precursor charge for the peptide or glycopeptide. Similarly, the second precursor m/z represents a ratio value associated with an ionized form having a second precursor charge for the peptide or glycopeptide. The first precursor ion is associated with a first product ion having a m/z ratio that was formed from a collision and the second precursor ion is associated with a second product ion having a m/z ratio that was formed from a collision. Under certain circumstances, the first precursor and the second precursor may be the same, but the associated first and second product m/z ratios are different.

[0895] Table 45 defines the peptide sequences for SEQ ID NOS: 307-316, 428-443, 450-462, 465-474, and 500-549 from at least one of Tables 41, 42, 43A, 43B, 43C, and 43D. Table 45 further identifies a corresponding protein SEQ TD NO. for each peptide sequence.

TABLE 45
Peptide SEQ ID NOS

| Pept | | Corresponding |
|---|---|---|
| SEQ ID | | Protein |
| NO: | Peptide Sequence | SEQ ID NO: |
| 307 | FGCEIENNR | 297 |
| 308 | VLSNNSDANLELINTWVAK | 298 |
| 309 | LISNCSK | 299 |
| 310 | EHEGAIYPDNTTDFQR | 300 |
| 311 | EEQYNSTYR | 301 |
| 312 | CSDGWSFDATTLDDNGTMLFFK | 302 |
| 313 | QVFPGLNYCTSGAYSNASSTDSASYYPLTGDTR | 303 |
| 314 | NLFLNHSENATAK | 304 |
| 315 | EEQYNSTFR | 305, 306 |
| 316 | EEQYNSTFR | 306 |
| 428 | QSVPAHFVALNGSK | 417 |
| 429 | QDQCIYNTTYLNVQR | 418 |
| 430 | YTGNASALFILPDQDK | 419 |
| 431 | VSNQTLSLFFTVLQDVPVR | 420 |
| 432 | ENLTAPGSDSAVFFEQGTTR | 300 |
| 433 | FVEGSHNSTVSLTTK | 303 |
| 434 | FNLTETSEAEIHQSFQHLLR | 419 |
| 435 | ADTHDEILEGLNFNLTEIPEAQIHEGFQELLR | 421 |
| 436 | NISDGFDGIPDNVDAALALPAHSYSGR | 422 |
| 437 | EEQFNSTFR | 423 |
| 438 | IPCSQPPQIEHGTINSSR | 424 |
| 439 | ENGTISR | 18 |
| 440 | LGNWSAMPSCK | 425 |
| 441 | ADGTVNQIEGEATPVNLTEPAK | 426 |
| 442 | QQQHLFGSNVTDCSGNFCLFR | 427 |
| 443 | GCVLLSYLNETVTVSASLESVR | 420 |
| 450 | NGSLFAFR | 422 |
| 451 | AALAAFNAQNNGSNFQLEEISR | 444 |
| 452 | DLLLPQPDLR | 445 |
| 453 | MVSHHNLTTGATLINEQWLLTTAK | 304 |
| 454 | CGLVPVLAENYNK | 427 |
| 455 | ALPQPQNVTSLLGCTH | 302 |
| 456 | TSESGELHGLTTEEEFVEGIYK | 446 |
| 457 | VVLHPNYSQVDIGLIK | 304 |
| 458 | SDVGFLPPFPTLDPEEK | 447 |
| 459 | VSFLSALEEYTK | 448 |
| 460 | TVVQPSVGAAAGPVVPPCPGR | 444 |
| 461 | THLAPYSDELR | 448 |
| 462 | FSLLGHASISCTVENETIGVWRPSPPTCEK | 449 |
| 465 | NEEYNK | 418, 463 |
| 466 | SVQEIQATFFYFTPNK | 418, 463 |
| 467 | ENGTVSR | 463 |
| 468 | LGNWSAMPSCK | 425 |
| 469 | ENLTAPGSDSAVFFEQGTTR | 300 |
| 470 | ELHHLQEQNVSNAFLDK | 300 |
| 471 | VCQDCPLLAPLNDTR | 444 |
| 472 | SWPAVGNCSSALR | 302 |
| 473 | SWPAVGNCSSALR | 302 |
| 474 | ITYSIVQTNCSK | 464 |
| 465 | LNAENNATFYFK | 464 |
| 500 | ADTHDEILEGLNFNLTEIPEAQIHEGFQELLR | 421 |
| 501 | VSNQTLSLFFTVLQDVPVR | 420 |
| 502 | VSNQTLSLFFTVLQDVPVR | 420 |
| 503 | FNLTETSEAEIHQSFQHLLR | 419 |
| 504 | FNLTETSEAEIHQSFQHLLR | 419 |
| 505 | FNLTETSEAEIHQSFQHLLR | 419 |
| 506 | YTGNASALFILPDQDK | 419 |
| 507 | YTGNASALFILPDQDK | 419 |
| 508 | NEEYNK | 418 or 463 |
| 509 | SVQEIQATFFYFTPNKTEDTIFLR | 418 or 463 |
| 510 | SVQEIQATFFYFTPNKTEDTIFLR | 418 or 463 |
| 511 | SVQEIQATFFYFTPNKTEDTIFLR | 418 or 463 |
| 512 | SVQEIQATFFYFTPNKTEDTIFLR | 418 or 463 |
| 513 | SVQEIQATFFYFTPNK | 418 or 463 |
| 514 | SVQEIQATFFYFTPNK | 418 or 463 |
| 515 | SVQEIQATFFYFTPNK | 418 or 463 |
| 516 | ENGTISR | 418 |
| 517 | ENGTISR | 418 |
| 518 | ENGTISR | 418 |
| 519 | ENGTISR | 418 |
| 520 | ENGTISR | 418 |
| 521 | QDQCIYNTTYLNVQR | 418 |
| 522 | QDQCIYNTTYLNVQR | 418 |
| 523 | QDQCIYNTTYLNVQR | 418 |
| 524 | QDQCIYNTTYLNVQR | 418 |
| 525 | QDQCIYNTTYLNVQR | 418 |
| 526 | QDQCIYNTTYLNVQR | 418 |
| 527 | QDQCIYNTTYLNVQR | 418 |
| 528 | ENGTVSR | 463 |
| 529 | ENGTVSR | 463 |
| 530 | ENGTVSR | 463 |
| 531 | VYKPSAGNNSLYR | 425 |
| 532 | LGNWSAMPSCK | 425 |
| 533 | ENLTAPGSDSAVFFEQGTTR | 300 |
| 534 | ELHHLQEQNVSNAFLDK | 300 |
| 535 | VCQDCPLLAPLNDTR | 444 |
| 536 | VCQDCPLLAPLNDTR | 444 |
| 537 | AALAAFNAQNNGSNFQLEEISR | 444 |
| 538 | SWPAVGNCSSALR | 302 |
| 539 | SWPAVGNCSSALR | 302 |
| 540 | MVSHHNLTTGATLINEQWLLTTAK | 304 |
| 541 | NLFLNHSENATAK | 304 |
| 542 | NLFLNHSENATAK | 304 |
| 543 | NLFLNHSENATAK | 304 |
| 544 | NLFLNHSENATAK | 304 |
| 545 | VVLHPNYSQVDIGLIK | 304 |
| 546 | VVLHPNYSQVDIGLIK | 304 |
| 547 | VVLHPNYSQVDIGLIK | 304 |
| 548 | VVLHPNYSQVDIGLIK | 304 |
| 549 | LNAENNATFYFK | 464 |

[0896] Table 46 identifies the proteins of SEQ ID NOS: 297-306, 417-427, 444-449, and 463-464 from at least of one of Tables 41, 42, 43A, 43B, 43C, and 43D. Table 46 identifies a corresponding protein abbreviation and protein name for each of protein SEQ TD NOS: 1-10, 20-30, 47-52, and 66-67. Further, Table 46 identifies a corresponding Uniprot TD and protein sequence for each of protein SEQ ID NOS: 297-306, 417-427, 444-449, and 463-464.

TABLE 46
Protein SEQ ID NOS

| SEQ | | | | |
|---|---|---|---|---|
| ID | Protein | | Uniprot | |
| NO. | Abbreviation | Protein Name | ID | Protein Sequence |
| 297 | ZA2G | Zinc-alpha-2- | P25311 | MVRMVPVLLSLLLLLGPAVPQENQDGR |
| | | glycoprotein | | YSLTYIYTGLSKHVEDVPAFQALGSLN |
| | | | | DLQFFRYNSKDRKSQPMGLWRQVEGM |
| | | | | EDWKQDSQLQKAREDIFMETLKDIVEY |
| | | | | YNDSNGSHVLQGRFGCEIENNRSSGAF |
| | | | | WKYYYDGKDYIEFNKEIPAWVPFDPAA |
| | | | | QITKQKWEAEPVYVQRAKAYLEEECPA |
| | | | | TLRKYLKYSKNILDRQDPPSVVVTSHQ |
| | | | | APGEKKKLKCLAYDFYPGKIDVHWTR |
| | | | | AGEVQEPELRGDVLHNGNGTYQSWVV |
| | | | | VAVPPQDTAPYSCHVQHSSLAQPLVVP |
| | | | | WEAS |
| 298 | IC1 | Plasma | P05155 | MASRLTLLTLLLLLLAGDRASSNPNATS |
| | | protease C1 | | SSSQDPESLQDRGEGKVATTVISKMLFV |
| | | inhibitor | | EPILEVSSLPTTNSTTNSATKITANTTDE |
| | | | | PTTQPTTEPTTQPTIQPTQPTTQLPTDSP |
| | | | | TQPTTGSFCPGPVTLCSDLESHSTEAVL |
| | | | | GDALVDFSLKLYHAFSAMKKVETNMA |
| | | | | FSPFSIASLLTQVLLGAGENTKTNLESIL |
| | | | | SYPKDFTCVHQALKGFTTKGVTSVSQIF |
| | | | | HSPDLAIRDTFVNASRTLYSSSPRVLSN |
| | | | | NSDANLELINTWVAKNTNNKISRLLDS |
| | | | | LPSDTRLVLLNAIYLSAKWKTTFDPKKT |
| | | | | RMEPFHFKNSVIKVPMMNSKKYPVAHF |
| | | | | IDQTLKAKVGQLQLSHNLSLVILVPQNL |
| | | | | KHRLEDMEQALSPSVFKAIMEKLEMSK |
| | | | | FQPTLLTLPRIKVTTSQDMLSIMEKLEFF |
| | | | | DFSYDLNLCGLTEDPDLQVSAMQHQTV |
| | | | | LELTETGVEAAAASAISVARTLLVFEVQ |
| | | | | QPFLFVLWDQQHKFPVFMGRVYDPRA |
| 299 | CFAI | Complement | P05156 | MKLLHVFLLFLCFHLRFCKVTYTSQED |
| | | Factor I | | LVEKKCLAKKYTHLSCDKVFCQPWQR |
| | | | | CIEGTCVCKLPYQCPKNGTAVCATNRR |
| | | | | SFPTYCQQKSLECLHPGTKFLNNGTCTA |
| | | | | EGKFSVSLKHGNTDSEGIVEVKLVDQD |
| | | | | KTMFICKSSWSMREANVACLDLGFQQ |
| | | | | GADTQRRFKLSDLSINSTECLHVHCRGL |
| | | | | ETSLAECTFTKRRTMGYQDFADVVCYT |
| | | | | QKADSPMDDFFQCVNGKYISQMKACD |
| | | | | GINDCGDQSDELCCKACQGKGFHCKSG |
| | | | | VCIPSQYQCNGEVDCITGEDEVGCAGF |
| | | | | ASVTQEETEILTADMDAERRRIKSLLPK |
| | | | | LSCGVKNRMHIRRKRIVGGKRAQLGDL |
| | | | | PWQVAIKDASGITCGGIYIGGCWILTAA |
| | | | | HCLRASKTHRYQIWTTVVDWIHPDLKR |
| | | | | IVIEYVDRIIFHENYNAGTYQNDIALIEM |
| | | | | KKDGNKKDCELPRSIPACVPWSPYLFQ |
| | | | | PNDTCIVSGWGREKDNERVFSLQWGEV |
| | | | | KLISNCSKFYGNRFYEKEMECAGTYDG |
| | | | | SIDACKGDSGGPLVCMDANNVTYVWG |
| | | | | VVSWGENCGKPEFPGVYTKVANYFDW |
| | | | | ISYHVGRPFISQYNV |
| 300 | CERU | Ceruloplasmin | P00450 | MKILILGIFLFLCSTPAWAKEKHYYIGII |
| | | | | ETTWDYASDHGEKKLISVDTEHSNIYL |
| | | | | QNGPDRIGRLYKKALYLQYTDETFRTTI |
| | | | | EKPVWLGFLGPIIKAETGDKVYVHLKN |
| | | | | LASRPYTFHSHGITYYKEHEGAIYPDNT |
| | | | | TDFQRADDKVYPGEQYTYMLLATEEQ |
| | | | | SPGEGDGNCVTRIYHSHIDAPKDIASGLI |
| | | | | GPLIICKKDSLDKEKEKHIDREFVVMFS |
| | | | | VVDENFSWYLEDNIKTYCSEPEKVDKD |
| | | | | NEDFQESNRMYSVNGYTFGSLPGLSMC |
| | | | | AEDRVKWYLFGMGNEVDVHAAFFHG |
| | | | | QALTNKNYRIDTINLFPATLFDAYMVA |
| | | | | QNPGEWMLSCQNLNHLKAGLQAFFQV |
| | | | | QECNKSSSKDNIRGKHVRHYYIAAEEII |
| | | | | WNYAPSGIDIFTKENLTAPGSDSAVFFE |
| | | | | QGTTRIGGSYKKLVYREYTDASFTNRK |
| | | | | ERGPEEEHLGILGPVIWAEVGDTIRVTF |
| | | | | HNKGAYPLSIEPIGVRFNKNNEGTYYSP |
| | | | | NYNPQSRSVPPSASHVAPTETFTYEWT |
| | | | | VPKEVGPTNADPVCLAKMYYSAVDPT |
| | | | | KDIFTGLIGPMKICKKGSLHANGRQKD |
| | | | | VDKEFYLFPTVFDENESLLLEDNIRMFT |
| | | | | TAPDQVDKEDEDFQESNKMHSMNGFM |
| | | | | YGNQPGLTMCKGDSVVWYLFSAGNEA |
| | | | | DVHGIYFSGNTYLWRGERRDTANLFPQ |
| | | | | TSLTLHMWPDTEGTFNVECLTTDHYTG |
| | | | | GMKQKYTVNQCRRQSEDSTFYLGERT |
| | | | | YYIAAVEVEWDYSPQREWEKELHHLQ |
| | | | | EQNVSNAFLDKGEFYIGSKYKKVVYRQ |
| | | | | YTDSTFRVPVERKAEEEHLGILGPQLHA |
| | | | | DVGDKVKIIFKNMATRPYSIHAHGVQT |
| | | | | ESSTVTPTLPGETLTYVWKIPERSGAGT |
| | | | | EDSACIPWAYYSTVDQVKDLYSGLIGP |
| | | | | LIVCRRPYLKVFNPRRKLEFALLFLVFD |
| | | | | ENESWYLDDNIKTYSDHPEKVNKDDEE |
| | | | | FIESNKMHAINGRMFGNLQGLTMHVG |
| | | | | DEVNWYLMGMGNEIDLHTVHFHGHSF |
| | | | | QYKHRGVYSSDVFDIFPGTYQTLEMFP |
| | | | | RTPGIWLLHCHVTDHIHAGMETTYTVL |
| | | | | QNEDTKSG |
| 301 | IGG1 | Immunoglobulin | P01857 | ASTKGPSVFPLAPSSKSTSGGTAALGCL |
| | | heavy constant | | VKDYFPEPVTVSWNSGALTSGVHTFPA |
| | | gamma 1 | | VLQSSGLYSLSSVVTVPSSSLGTQTYIC |
| | | | | NVNHKPSNTKVDKKVEPKSCDKTHTCP |
| | | | | PCPAPELLGGPSVFLFPPKPKDTLMISRT |
| | | | | PEVTCVVVDVSHEDPEVKFNWYVDGV |
| | | | | EVHNAKTKPREEQYNSTYRVVSVLTVL |
| | | | | HQDWLNGKEYKCKVSNKALPAPIEKTI |
| | | | | SKAKGQPREPQVYTLPPSRDELTKNQV |
| | | | | SLTCLVKGFYPSDIAVEWESNGQPENN |
| | | | | YKTTPPVLDSDGSFFLYSKLTVDKSRW |
| | | | | QQGNVFSCSVMHEALHNHYTQKSLSLS |
| | | | | PGK |
| 302 | HEMO | Hemopexin | P02790 | MARVLGAPVALGLWSLCWSLAIATPLP |
| | | | | PTSAHGNVAEGETKPDPDVTERCSDGW |
| | | | | SFDATTLDDNGTMLFFKGEFVWKSHK |
| | | | | WDRELISERWKNFPSPVDAAFRQGHNS |
| | | | | VFLIKGDKVWVYPPEKKEKGYPKLLQD |
| | | | | EFPGIPSPLDAAVECHRGECQAEGVLFF |
| | | | | QGDREWFWDLATGTMKERSWPAVGN |
| | | | | CSSALRWLGRYYCFQGNQFLRFDPVRG |
| | | | | EVPPRYPRDVRDYFMPCPGRGHGHRN |
| | | | | GTGHGNSTHHGPEYMRCSPHLVLSALT |
| | | | | SDNHGATYAFSGTHYWRLDTSRDGWH |
| | | | | SWPIAHQWPQGPSAVDAAFSWEEKLYL |
| | | | | VQGTQVYVFLTKGGYTLVSGYPKRLEK |
| | | | | EVGTPHGIILDSVDAAFICPGSSRLHIMA |
| | | | | GRRLWWLDLKSGAQATWTELPWPHEK |
| | | | | VDGALCMEKSLGPNSCSANGPGLYLIH |
| | | | | GPNLYCYSDVEKLNAAKALPQPQNVTS |
| | | | | LLGCTH |
| 303 | APOB | Apolipoprotein | P04114 | MDPPRPALLALLALPALLLLLLAGARA |
| | | B-100 | | EEEMLENVSLVCPKDATRFKHLRKYTY |
| | | | | NYEAESSSGVPGTADSRSATRINCKVEL |
| | | | | EVPQLCSFILKTSQCTLKEVYGFNPEGK |
| | | | | ALLKKTKNSEEFAAAMSRYELKLAIPE |
| | | | | GKQVFLYPEKDEPTYILNIKRGIISALLV |
| | | | | PPETEEAKQVLFLDTVYGNCSTHFTVK |
| | | | | TRKGNVATEISTERDLGQCDRFKPIRTG |
| | | | | ISPLALIKGMTRPLSTLISSSQSCQYTLD |
| | | | | AKRKHVAEAICKEQHLFLPFSYKNKYG |
| | | | | MVAQVTQTLKLEDTPKINSRFFGEGTK |
| | | | | KMGLAFESTKSTSPPKQAEAVLKTLQE |
| | | | | LKKLTISEQNIQRANLFNKLVTELRGLS |
| | | | | DEAVTSLLPQLIEVSSPITLQALVQCGQP |
| | | | | QCSTHILQWLKRVHANPLLIDVVTYLV |
| | | | | ALIPEPSAQQLREIFNMARDQRSRATLY |
| | | | | ALSHAVNNYHKTNPTGTQELLDIANYL |
| | | | | MEQIQDDCTGDEDYTYLILRVIGNMGQ |
| | | | | TMEQLTPELKSSILKCVQSTKPSLMIQK |
| | | | | AAIQALRKMEPKDKDQEVLLQTFLDDA |
| | | | | SPGDKRLAAYLMLMRSPSQADINKIVQI |
| | | | | LPWEQNEQVKNFVASHIANILNSEELDI |
| | | | | QDLKKLVKEALKESQLPTVMDFRKFSR |
| | | | | NYQLYKSVSLPSLDPASAKIEGNLIFDP |
| | | | | NNYLPKESMLKTTLTAFGFASADLIEIG |
| | | | | LEGKGFEPTLEALFGKQGFFPDSVNKAL |
| | | | | YWVNGQVPDGVSKVLVDHFGYTKDD |
| | | | | KHEQDMVNGIMLSVEKLIKDLKSKEVP |
| | | | | EARAYLRILGEELGFASLHDLQLLGKLL |
| | | | | LMGARTLQGIPQMIGEVIRKGSKNDFFL |
| | | | | HYIFMENAFELPTGAGLQLQISSSGVIAP |
| | | | | GAKAGVKLEVANMQAELVAKPSVSVE |
| | | | | FVTNMGIIIPDFARSGVQMNTNFFHESG |
| | | | | LEAHVALKAGKLKFIIPSPKRPVKLLSG |
| | | | | GNTLHLVSTTKTEVIPPLIENRQSWSVC |
| | | | | KQVFPGLNYCTSGAYSNASSTDSASYY |
| | | | | PLTGDTRLELELRPTGEIEQYSVSATYE |
| | | | | LQREDRALVDTLKFVTQAEGAKQTEAT |
| | | | | MTFKYNRQSMTLSSEVQIPDFDVDLGTI |
| | | | | LRVNDESTEGKTSYRLTLDIQNKKITEV |
| | | | | ALMGHLSCDTKEERKIKGVISIPRLQAE |
| | | | | ARSEILAHWSPAKLLLQMDSSATAYGS |
| | | | | TVSKRVAWHYDEEKIEFEWNTGTNVD |
| | | | | TKKMTSNFPVDLSDYPKSLHMYANRLL |
| | | | | DHRVPQTDMTFRHVGSKLIVAMSSWL |
| | | | | QKASGSLPYTQTLQDHLNSLKEFNLQN |
| | | | | MGLPDFHIPENLFLKSDGRVKYTLNKN |
| | | | | SLKIEIPLPFGGKSSRDLKMLETVRTPAL |
| | | | | HFKSVGFHLPSREFQVPTFTIPKLYQLQ |
| | | | | VPLLGVLDLSTNVYSNLYNWSASYSGG |
| | | | | NTSTDHFSLRARYHMKADSVVDLLSYN |
| | | | | VQGSGETTYDHKNTFTLSYDGSLRHKF |
| | | | | LDSNIKFSHVEKLGNNPVSKGLLIFDAS |
| | | | | SSWGPQMSASVHLDSKKKQHLFVKEV |
| | | | | KIDGQFRVSSFYAKGTYGLSCQRDPNT |
| | | | | GRLNGESNLRFNSSYLQGTNQITGRYE |
| | | | | DGTLSLTSTSDLQSGIIKNTASLKYENY |
| | | | | ELTLKSDTNGKYKNFATSNKMDMTFS |
| | | | | KQNALLRSEYQADYESLRFFSLLSGSLN |
| | | | | SHGLELNADILGTDKINSGAHKATLRIG |
| | | | | QDGISTSATTNLKCSLLVLENELNAELG |
| | | | | LSGASMKLTTNGRFREHNAKFSLDGKA |
| | | | | ALTELSLGSAYQAMILGVDSKNIFNFKV |
| | | | | SQEGLKLSNDMMGSYAEMKFDHTNSL |
| | | | | NIAGLSLDFSSKLDNIYSSDKFYKQTVN |
| | | | | LQLQPYSLVTTLNSDLKYNALDLTNNG |
| | | | | KLRLEPLKLHVAGNLKGAYQNNEIKHI |
| | | | | YAISSAALSASYKADTVAKVQGVEFSH |
| | | | | RLNTDIAGLASAIDMSTNYNSDSLHFSN |
| | | | | VFRSVMAPFTMTIDAHTNGNGKLALW |
| | | | | GEHTGQLYSKFLLKAEPLAFTFSHDYK |
| | | | | GSTSHHLVSRKSISAALEHKVSALLTPA |
| | | | | EQTGTWKLKTQFNNNEYSQDLDAYNT |
| | | | | KDKIGVELTGRTLADLTLLDSPIKVPLL |
| | | | | LSEPINIIDALEMRDAVEKPQEFTIVAFV |
| | | | | KYDKNQDVHSINLPFFETLQEYFERNR |
| | | | | QTIIVVLENVQRNLKHINIDQFVRKYRA |
| | | | | ALGKLPQQANDYLNSFNWERQVSHAK |
| | | | | EKLTALTKKYRITENDIQIALDDAKINF |
| | | | | NEKLSQLQTYMIQFDQYIKDSYDLHDL |
| | | | | KIAIANIIDEIIEKLKSLDEHYHIRVNLVK |
| | | | | TIHDLHLFIENIDFNKSGSSTASWIQNVD |
| | | | | TKYQIRIQIQEKLQQLKRHIQNIDIQHLA |
| | | | | GKLKQHIEAIDVRVLLDQLGTTISFERIN |
| | | | | DILEHVKHFVINLIGDFEVAEKINAFRA |
| | | | | KVHELIERYEVDQQIQVLMDKLVELAH |
| | | | | QYKLKETIQKLSNVLQQVKIKDYFEKL |
| | | | | VGFIDDAVKKLNELSFKTFIEDVNKFLD |
| | | | | MLIKKLKSFDYHQFVDETNDKIREVTQ |
| | | | | RLNGEIQALELPQKAEALKLFLEETKAT |
| | | | | VAVYLESLQDTKITLIINWLQEALSSAS |
| | | | | LAHMKAKFRETLEDTRDRMYQMDIQQ |
| | | | | ELQRYLSLVGQVYSTLVTYISDWWTLA |
| | | | | AKNLTDFAEQYSIQDWAKRMKALVEQ |
| | | | | GFTVPEIKTILGTMPAFEVSLQALQKAT |
| | | | | FQTPDFIVPLTDLRIPSVQINFKDLKNIKI |
| | | | | PSRFSTPEFTILNTFHIPSFTIDFVEMKVK |
| | | | | IIRTIDQMLNSELQWPVPDIYLRDLKVE |
| | | | | DIPLARITLPDFRLPEIAIPEFIIPTLNLND |
| | | | | FQVPDLHIPEFQLPHISHTIEVPTFGKLY |
| | | | | SILKIQSPLFTLDANADIGNGTTSANEAG |
| | | | | IAASITAKGESKLEVLNFDFQANAQLSN |
| | | | | PKINPLALKESVKFSSKYLRTEHGSEML |
| | | | | FFGNAIEGKSNTVASLHTEKNTLELSNG |
| | | | | VIVKINNQLTLDSNTKYFHKLNIPKLDF |
| | | | | SSQADLRNEIKTLLKAGHIAWTSSGKGS |
| | | | | WKWACPRFSDEGTHESQISFTIEGPLTS |
| | | | | FGLSNKINSKHLRVNQNLVYESGSLNFS |
| | | | | KLEIQSQVDSQHVGHSVLTAKGMALFG |
| | | | | EGKAEFTGRHDAHLNGKVIGTLKNSLF |
| | | | | FSAQPFEITASTNNEGNLKVRFPLRLTG |
| | | | | KIDFLNNYALFLSPSAQQASWQVSARF |
| | | | | NQYKYNQNFSAGNNENIMEAHVGING |
| | | | | EANLDFLNIPLTIPEMRLPYTIITTPPLKD |
| | | | | FSLWEKTGLKEFLKTTKQSFDLSVKAQ |
| | | | | YKKNKHRHSITNPLAVLCEFISQSIKSFD |
| | | | | RHFEKNRNNALDFVTKSYNETKIKFDK |
| | | | | YKAEKSHDELPRTFQIPGYTVPVVNVE |
| | | | | VSPFTIEMSAFGYVFPKAVSMPSFSILGS |
| | | | | DVRVPSYTLILPSLELPVLHVPRNLKLSL |
| | | | | PDFKELCTISHIFIPAMGNITYDFSFKSSV |
| | | | | ITLNTNAELFNQSDIVAHLLSSSSSVIDA |
| | | | | LQYKLEGTTRLTRKRGLKLATALSLSN |
| | | | | KFVEGSHNSTVSLTTKNMEVSVATTTK |
| | | | | AQIPILRMNFKQELNGNTKSKPTVSSSM |
| | | | | EFKYDFNSSMLYSTAKGAVDHKLSLES |
| | | | | LTSYFSIESSTKGDVKGSVLSREYSGTIA |
| | | | | SEANTYLNSKSTRSSVKLQGTSKIDDIW |
| | | | | NLEVKENFAGEATLQRIYSLWEHSTKN |
| | | | | HLQLEGLFFTNGEHTSKATLELSPWQM |
| | | | | SALVQVHASQPSSFHDFPDLGQEVALN |
| | | | | ANTKNQKIRWKNEVRIHSGSFQSQVEL |
| | | | | SNDQEKAHLDIAGSLEGHLRFLKNIILP |
| | | | | VYDKSLWDFLKLDVTTSIGRRQHLRVS |
| | | | | TAFVYTKNPNGYSFSIPVKVLADKFIIPG |
| | | | | LKLNDLNSVLVMPTFHVPFTDLQVPSC |
| | | | | KLDFREIQIYKKLRTSSFALNLPTLPEVK |
| | | | | FPEVDVLTKYSQPEDSLIPFFEITVPESQ |
| | | | | LTVSQFTLPKSVSDGIAALDLNAVANKI |
| | | | | ADFELPTIIVPEQTIEIPSIKFSVPAGIVIPS |
| | | | | FQALTARFEVDSPVYNATWSASLKNKA |
| | | | | DYVETVLDSTCSSTVQFLEYELNVLGT |
| | | | | HKIEDGTLASKTKGTFAHRDFSAEYEE |
| | | | | DGKYEGLQEWEGKAHLNIKSPAFTDLH |
| | | | | LRYQKDKKGISTSAASPAVGTVGMDM |
| | | | | DEDDDFSKWNFYYSPQSSPDKKLTIFKT |
| | | | | ELRVRESDEETQIKVNWEEEAASGLLTS |
| | | | | LKDNVPKATGVLYDYVNKYHWEHTGL |
| | | | | TLREVSSKLRRNLQNNAEWVYQGAIRQ |
| | | | | IDDIDVRFQKAASGTTGTYQEWKDKAQ |
| | | | | NLYQELLTQEGQASFQGLKDNVFDGLV |
| | | | | RVTQEFHMKVKHLIDSLIDFLNFPRFQF |
| | | | | PGKPGIYTREELCTMFIREVGTVLSQVY |
| | | | | SKVHNGSEILFSYFQDLVITLPFELRKHK |
| | | | | LIDVISMYRELLKDLSKEAQEVFKAIQS |
| | | | | LKTTEVLRNLQDLLQFIFQLIEDNIKQLK |
| | | | | EMKFTYLINYIQDEINTIFSDYIPYVFKL |
| | | | | LKENLCLNLHKFNEFIQNELQEASQELQ |
| | | | | QIHQYIMALREEYFDPSIVGWTVKYYE |
| | | | | LEEKIVSLIKNLLVALKDFHSEYIVSASN |
| | | | | FTSQLSSQVEQFLHRNIQEYLSILTDPDG |
| | | | | KGKEKIAELSATAQEIIKSQAIATKKIISD |
| | | | | YHQQFRYKLQDFSDQLSDYYEKFIAES |
| | | | | KRLIDLSIQNYHTFLIYITELLKKLQSTT |
| | | | | VMNPYMKLAPGELTIIL |
| 304 | HPT | Haptoglobin | P00738 | MSALGAVIALLLWGQLFAVDSGNDVT |
| | | | | DIADDGCPKPPEIAHGYVEHSVRYQCK |
| | | | | NYYKLRTEGDGVYTLNDKKQWINKAV |
| | | | | GDKLPECEADDGCPKPPEIAHGYVEHS |
| | | | | VRYQCKNYYKLRTEGDGVYTLNNEKQ |
| | | | | WINKAVGDKLPECEAVCGKPKNPANP |
| | | | | VQRILGGHLDAKGSFPWQAKMVSHHN |
| | | | | LTTGATLINEQWLLTTAKNLFLNHSEN |
| | | | | ATAKDIAPTLTLYVGKKQLVEIEKVVL |
| | | | | HPNYSQVDIGLIKLKQKVSVNERVMPIC |
| | | | | LPSKDYAEVGRVGYVSGWGRNANFKF |
| | | | | TDHLKYVMLPVADQDQCIRHYEGSTVP |
| | | | | EKKTPKSPVGVQPILNEHTFCAGMSKY |
| | | | | QEDTCYGDAGSAFAVHDLEEDTWYAT |
| | | | | GILSFDKSCAVAEYGVYVKVTSIQDWV |
| | | | | QKTIAEN |
| 305 | IGG3 | Immunoglobulin | P01860 | ASTKGPSVFPLAPCSRSTSGGTAALGCL |
| | | heavy constant | | VKDYFPEPVTVSWNSGALTSGVHTFPA |
| | | gamma 3 | | VLQSSGLYSLSSVVTVPSSSLGTQTYTC |
| | | | | NVNHKPSNTKVDKRVELKTPLGDTTHT |
| | | | | CPRCPEPKSCDTPPPCPRCPEPKSCDTPP |
| | | | | PCPRCPEPKSCDTPPPCPRCPAPELLGGP |
| | | | | SVFLFPPKPKDTLMISRTPEVTCVVVDV |
| | | | | SHEDPEVQFKWYVDGVEVHNAKTKPR |
| | | | | EEQYNSTFRVVSVLTVLHQDWLNGKE |
| | | | | YKCKVSNKALPAPIEKTISKTKGQPREP |
| | | | | QVYTLPPSREEMTKNQVSLTCLVKGFY |
| | | | | PSDIAVEWESSGQPENNYNTTPPMLDS |
| | | | | DGSFFLYSKLTVDKSRWQQGNIFSCSV |
| | | | | MHEALHNRFTQKSLSLSPGK |
| 306 | IGG34 | Immunoglobulin | P01860 | ASTKGPSVFPLAPCSRSTSGGTAALGCL |
| | | heavy constant | | VKDYFPEPVTVSWNSGALTSGVHTFPA |
| | | gamma 34 | | VLQSSGLYSLSSVVTVPSSSLGTQTYTC |
| | | | | NVNHKPSNTKVDKRVELKTPLGDTTHT |
| | | | | CPRCPEPKSCDTPPPCPRCPEPKSCDTPP |
| | | | | PCPRCPEPKSCDTPPPCPRCPAPELLGGP |
| | | | | SVFLFPPKPKDTLMISRTPEVTCVVVDV |
| | | | | SHEDPEVQFKWYVDGVEVHNAKTKPR |
| | | | | EEQYNSTFRVVSVLTVLHQDWLNGKE |
| | | | | YKCKVSNKALPAPIEKTISKTKGQPREP |
| | | | | QVYTLPPSREEMTKNQVSLTCLVKGFY |
| | | | | PSDIAVEWESSGQPENNYNTTPPMLDS |
| | | | | DGSFFLYSKLTVDKSRWQQGNIFSCSV |
| | | | | MHEALHNRFTQKSLSLSPGK |
| 417 | CO2 | ComplementC | P06681 | MGPLMVLFCLLFLYPGLADSAPSCPQN |
| | | 2 | | VNISGGTFTLSHGWAPGSLLTYSCPQGL |
| | | | | YPSPASRLCKSSGQWQTPGATRSLSKA |
| | | | | VCKPVRCPAPVSFENGIYTPRLGSYPVG |
| | | | | GNVSFECEDGFILRGSPVRQCRPNGMW |
| | | | | DGETAVCDNGAGHCPNPGISLGAVRTG |
| | | | | FRFGHGDKVRYRCSSNLVLTGSSEREC |
| | | | | QGNGVWSGTEPICRQPYSYDFPEDVAP |
| | | | | ALGTSFSHMLGATNPTQKTKESLGRKI |
| | | | | QIQRSGHLNLYLLLDCSQSVSENDFLIF |
| | | | | KESASLMVDRIFSFEINVSVAIITFASEPK |
| | | | | VLMSVLNDNSRDMTEVISSLENANYKD |
| | | | | HENGTGTNTYAALNSVYLMMNNQMR |
| | | | | LLGMETMAWQEIRHAIILLTDGKSNMG |
| | | | | GSPKTAVDHIREILNINQKRNDYLDIYAI |
| | | | | GVGKLDVDWRELNELGSKKDGERHAF |
| | | | | ILQDTKALHQVFEHMLDVSKLTDTICG |
| | | | | VGNMSANASDQERTPWHVTIKPKSQET |
| | | | | CRGALISDQWVLTAAHCFRDGNDHSL |
| | | | | WRVNVGDPKSQWGKEFLIEKAVISPGF |
| | | | | DVFAKKNQGILEFYGDDIALLKLAQKV |
| | | | | KMSTHARPICLPCTMEANLALRRPQGS |
| | | | | TCRDHENELLNKQSVPAHFVALNGSKL |
| | | | | NINLKMGVEWTSCAEVVSQEKTMFPNL |
| | | | | TDVREVVTDQFLCSGTQEDESPCKGES |
| | | | | GGAVFLERRFRFFQVGLVSWGLYNPCL |
| | | | | GSADKNSRKRAPRSKVPPPRDFHINLFR |
| | | | | MQPWLRQHLGDVLNFLPL |
| 418 | AGP1 | Alpha-1-acid | P02763 | MALSWVLTVLSLLPLLEAQIPLCANLVP |
| | | glycoprotein 1 | | VPITNATLDQITGKWFYIASAFRNEEYN |
| | | | | KSVQEIQATFFYFTPNKTEDTIFLREYQT |
| | | | | RQDQCIYNTTYLNVQRENGTISRYVGG |
| | | | | QEHFAHLLILRDTKTYMLAFDVNDEKN |
| | | | | WGLSVYADKPETTKEQLGEFYEALDCL |
| | | | | RIPKSDVVYTDWKKDKCEPLEKQHEKE |
| | | | | RKQEEGES |
| 419 | AACT | Alpha-1- | P01011 | MERMLPLLALGLLAAGFCPAVLCHPNS |
| | | anti- | | PLDEENLTQENQDRGTHVDLGLASANV |
| | | chymotrypsin | | DFAFSLYKQLVLKAPDKNVIFSPLSISTA |
| | | | | LAFLSLGAHNTTLTEILKGLKFNLTETS |
| | | | | EAEIHQSFQHLLRTLNQSSDELQLSMGN |
| | | | | AMFVKEQLSLLDRFTEDAKRLYGSEAF |
| | | | | ATDFQDSAAAKKLINDYVKNGTRGKIT |
| | | | | DLIKDLDSQTMMVLVNYIFFKAKWEM |
| | | | | PFDPQDTHQSRFYLSKKKWVMVPMMS |
| | | | | LHHLTIPYFRDEELSCTVVELKYTGNAS |
| | | | | ALFILPDQDKMEEVEAMLLPETLKRWR |
| | | | | DSLEFREIGELYLPKFSISRDYNLNDILL |
| | | | | QLGIEEAFTSKADLSGITGARNLAVSQV |
| | | | | VHKAVLDVFEEGTEASAATAVKITLLS |
| | | | | ALVETRTIVRFNRPFLMIIVPTDTQNIFF |
| | | | | MSKVTNPKQA |
| 420 | A2MG | Alpha-2- | P01023 | MGKNKLLHPSLVLLLLVLLPTDASVSG |
| | | macroglobulin | | KPQYMVLVPSLLHTETTEKGCVLLSYL |
| | | | | NETVTVSASLESVRGNRSLFTDLEAEND |
| | | | | VLHCVAFAVPKSSSNEEVMFLTVQVKG |
| | | | | PTQEFKKRTTVMVKNEDSLVFVQTDKS |
| | | | | IYKPGQTVKFRVVSMDENFHPLNELIPL |
| | | | | VYIQDPKGNRIAQWQSFQLEGGLKQFS |
| | | | | FPLSSEPFQGSYKVVVQKKSGGRTEHPF |
| | | | | TVEEFVLPKFEVQVTVPKIITILEEEMNV |
| | | | | SVCGLYTYGKPVPGHVTVSICRKYSDA |
| | | | | SDCHGEDSQAFCEKFSGQLNSHGCFYQ |
| | | | | QVKTKVFQLKRKEYEMKLHTEAQIQEE |
| | | | | GTVVELTGRQSSEITRTITKLSFVKVDS |
| | | | | HFRQGIPFFGQVRLVDGKGVPIPNKVIFI |
| | | | | RGNEANYYSNATTDEHGLVQFSINTTN |
| | | | | VMGTSLTVRVNYKDRSPCYGYQWVSE |
| | | | | EHEEAHHTAYLVFSPSKSFVHLEPMSHE |
| | | | | LPCGHTQTVQAHYILNGGTLLGLKKLS |
| | | | | FYYLIMAKGGIVRTGTHGLLVKQEDMK |
| | | | | GHFSISIPVKSDIAPVARLLIYAVLPTGD |
| | | | | VIGDSAKYDVENCLANKVDLSFSPSQSL |
| | | | | PASHAHLRVTAAPQSVCALRAVDQSVL |
| | | | | LMKPDAELSASSVYNLLPEKDLTGFPGP |
| | | | | LNDQDNEDCINRHNVYINGITYTPVSST |
| | | | | NEKDMYSFLEDMGLKAFTNSKIRKPKM |
| | | | | CPQLQQYEMHGPEGLRVGFYESDVMG |
| | | | | RGHARLVHVEEPHTETVRKYFPETWIW |
| | | | | DLVVVNSAGVAEVGVTVPDTITEWKA |
| | | | | GAFCLSEDAGLGISSTASLRAFQPFFVEL |
| | | | | TMPYSVIRGEAFTLKATVLNYLPKCIRV |
| | | | | SVQLEASPAFLAVPVEKEQAPHCICANG |
| | | | | RQTVSWAVTPKSLGNVNFTVSAEALES |
| | | | | QELCGTEVPSVPEHGRKDTVIKPLLVEP |
| | | | | EGLEKETTFNSLLCPSGGEVSEELSLKLP |
| | | | | PNVVEESARASVSVLGDILGSAMQNTQ |
| | | | | NLLQMPYGCGEQNMVLFAPNIYVLDY |
| | | | | LNETQQLTPEIKSKAIGYLNTGYQRQLN |
| | | | | YKHYDGSYSTFGERYGRNQGNTWLTA |
| | | | | FVLKTFAQARAYIFIDEAHITQALIWLS |
| | | | | QRQKDNGCFRSSGSLLNNAIKGGVEDE |
| | | | | VTLSAYITIALLEIPLTVTHPVVRNALFC |
| | | | | LESAWKTAQEGDHGSHVYTKALLAYA |
| | | | | FALAGNQDKRKEVLKSLNEEAVKKDN |
| | | | | SVHWERPQKPKAPVGHFYEPQAPSAEV |
| | | | | EMTSYVLLAYLTAQPAPTSEDLTSATNI |
| | | | | VKWITKQQNAQGGFSSTQDTVVALHA |
| | | | | LSKYGAATFTRTGKAAQVTIQSSGTFSS |
| | | | | KFQVDNNNRLLLQQVSLPELPGEYSMK |
| | | | | VTGEGCVYLQTSLKYNILPEKEEFPFAL |
| | | | | GVQTLPQTCDEPKAHTSFQISLSVSYTG |
| | | | | SRSASNMAIVDVKMVSGFIPLKPTVKM |
| | | | | LERSNHVSRTEVSSNHVLIYLDKVSNQT |
| | | | | LSLFFTVLQDVPVRDLKPAIVKVYDYY |
| | | | | ETDEFAIAEYNAPCSKDLGNA |
| 421 | A1AT | Alpha-1- | P01009 | MPSSVSWGILLLAGLCCLVPVSLAEDPQ |
| | | antitrypsin | | GDAAQKTDTSHHDQDHPTFNKITPNLA |
| | | | | EFAFSLYRQLAHQSNSTNIFFSPVSIATA |
| | | | | FAMLSLGTKADTHDEILEGLNFNLTEIP |
| | | | | EAQIHEGFQELLRTLNQPDSQLQLTTGN |
| | | | | GLFLSEGLKLVDKFLEDVKKLYHSEAF |
| | | | | TVNFGDTEEAKKQINDYVEKGTQGKIV |
| | | | | DLVKELDRDTVFALVNYIFFKGKWERP |
| | | | | FEVKDTEEEDFHVDQVTTVKVPMMKR |
| | | | | LGMFNIQHCKKLSSWVLLMKYLGNAT |
| | | | | AIFFLPDEGKLQHLENELTHDIITKFLEN |
| | | | | EDRRSASLHLPKLSITGTYDLKSVLGQL |
| | | | | GITKVFSNGADLSGVTEEAPLKLSKAV |
| | | | | HKAVLTIDEKGTEAAGAMFLEAIPMSIP |
| | | | | PEVKFNKPFVFLMIEQNTKSPLFMGKV |
| | | | | VNPTQK |
| 422 | VTNC | Vitronectin | P04004 | MAPLRPLLILALLAWVALADQESCKGR |
| | | | | CTEGFNVDKKCQCDELCSYYQSCCTDY |
| | | | | TAECKPQVTRGDVFTMPEDEYTVYDD |
| | | | | GEEKNNATVHEQVGGPSLTSDLQAQSK |
| | | | | GNPEQTPVLKPEEEAPAPEVGASKPEGI |
| | | | | DSRPETLHPGRPQPPAEEELCSGKPFDA |
| | | | | FTDLKNGSLFAFRGQYCYELDEKAVRP |
| | | | | GYPKLIRDVWGIEGPIDAAFTRINCQGK |
| | | | | TYLFKGSQYWRFEDGVLDPDYPRNISD |
| | | | | GFDGIPDNVDAALALPAHSYSGRERVY |
| | | | | FFKGKQYWEYQFQHQPSQEECEGSSLS |
| | | | | AVFEHFAMMQRDSWEDIFELLFWGRTS |
| | | | | AGTRQPQFISRDWHGVPGQVDAAMAG |
| | | | | RIYISGMAPRPSLAKKQRFRHRNRKGY |
| | | | | RSQRGHSRGRNQNSRRPSRATWLSLFS |
| | | | | SEESNLGANNYDDYRMDWLVPATCEPI |
| | | | | QSVFFFSGDKYYRVNLRTRRVDTVDPP |
| | | | | YPRSIAQYWLGCPAPGHL |
| 423 | IGG2 | Immunoglobulin | P01859 | ASTKGPSVFPLAPCSRSTSESTAALGCL |
| | | heavy constant | | VKDYFPEPVTVSWNSGALTSGVHTFPA |
| | | gamma 2 | | VLQSSGLYSLSSVVTVPSSNFGTQTYTC |
| | | | | NVDHKPSNTKVDKTVERKCCVECPPCP |
| | | | | APPVAGPSVFLFPPKPKDTLMISRTPEVT |
| | | | | CVVVDVSHEDPEVQFNWYVDGVEVHN |
| | | | | AKTKPREEQFNSTFRVVSVLTVVHQDW |
| | | | | LNGKEYKCKVSNKGLPAPIEKTISKTKG |
| | | | | QPREPQVYTLPPSREEMTKNQVSLTCL |
| | | | | VKGFYPSDISVEWESNGQPENNYKTTPP |
| | | | | MLDSDGSFFLYSKLTVDKSRWQQGNV |
| | | | | FSCSVMHEALHNHYTQKSLSLSPGK |
| | | | | MRLLAKIICLMLWAICVAEDCNELPPRR |
| | | | | NTEILTGSWSDQTYPEGTQAIYKCRPGY |
| | | | | RSLGNVIMVCRKGEWVALNPLRKCQK |
| | | | | RPCGHPGDTPFGTFTLTGGNVFEYGVK |
| | | | | AVYTCNEGYQLLGEINYRECDTDGWT |
| | | | | NDIPICEVVKCLPVTAPENGKIVSSAME |
| | | | | PDREYHFGQAVRFVCNSGYKIEGDEEM |
| | | | | HCSDDGFWSKEKPKCVEISCKSPDVING |
| 424 | CFAH | Complement | P08603 | SPISQKIIYKENERFQYKCNMGYEYSER |
| | | Factor H | | GDAVCTESGWRPLPSCEEKSCDNPYIPN |
| | | | | GDYSPLRIKHRTGDEITYQCRNGFYPAT |
| | | | | RGNTAKCTSTGWIPAPRCTLKPCDYPDI |
| | | | | KHGGLYHENMRRPYFPVAVGKYYSYY |
| | | | | CDEHFETPSGSYWDHIHCTQDGWSPAV |
| | | | | PCLRKCYFPYLENGYNQNYGRKFVQG |
| | | | | KSIDVACHPGYALPKAQTTVTCMENG |
| | | | | WSPTPRCIRVKTCSKSSIDIENGFISESQY |
| | | | | TYALKEKAKYQCKLGYVTADGETSGSI |
| | | | | TCGKDGWSAQPTCIKSCDIPVFMNART |
| | | | | KNDFTWFKLNDTLDYECHDGYESNTG |
| | | | | STTGSIVCGYNGWSDLPICYERECELPKI |
| | | | | DVHLVPDRKKDQYKVGEVLKFSCKPG |
| | | | | FTIVGPNSVQCYHFGLSPDLPICKEQVQ |
| | | | | SCGPPPELLNGNVKEKTKEEYGHSEVV |
| | | | | EYYCNPRFLMKGPNKIQCVDGEWTTLP |
| | | | | VCIVEESTCGDIPELEHGWAQLSSPPYY |
| | | | | YGDSVEFNCSESFTMIGHRSITCIHGVW |
| | | | | TQLPQCVAIDKLKKCKSSNLIILEEHLK |
| | | | | NKKEFDHNSNIRYRCRGKEGWIHTVCI |
| | | | | NGRWDPEVNCSMAQIQLCPPPPQIPNSH |
| | | | | NMTTTLNYRDGEKVSVLCQENYLIQEG |
| | | | | EEITCKDGRWQSIPLCVEKIPCSQPPQIE |
| | | | | HGTINSSRSSQESYAHGTKLSYTCEGGF |
| | | | | RISEENETTCYMGKWSSPPQCEGLPCKS |
| | | | | PPEISHGVVAHMSDSYQYGEEVTYKCF |
| | | | | EGFGIDGPAIAKCLGEKWSHPPSCIKTD |
| | | | | CLSLPSFENAIPMGEKKDVYKAGEQVT |
| | | | | YTCATYYKMDGASNVTCINSRWTGRP |
| | | | | TCRDTSCVNPPTVQNAYIVSRQMSKYP |
| | | | | SGERVRYQCRSPYEMFGDEEVMCLNG |
| | | | | NWTEPPQCKDSTGKCGPPPPIDNGDITS |
| | | | | FPLSVYAPASSVEYQCQNLYQLEGNKRI |
| | | | | TCRNGQWSEPPKCLHPCVISREIMENYN |
| | | | | IALRWTAKQKLYSRTGESVEFVCKRGY |
| | | | | RLSSRSHTLRTTCWDGKLEYPTCAKR |
| 425 | APOH | Beta-2- | P02749 | MISPVLILFSSFLCHVAIAGRTCPKPDDL |
| | | glycoprotein 1 | | PFSTVVPLKTFYEPGEEITYSCKPGYVSR |
| | | | | GGMRKFICPLTGLWPINTLKCTPRVCPF |
| | | | | AGILENGAVRYTTFEYPNTISFSCNTGF |
| | | | | YLNGADSAKCTEEGKWSPELPVCAPIIC |
| | | | | PPPSIPTFATLRVYKPSAGNNSLYRDTA |
| | | | | VFECLPQHAMFGNDTITCTTHGNWTKL |
| | | | | PECREVKCPFPSRPDNGFVNYPAKPTLY |
| | | | | YKDKATFGCHDGYSLDGPEEIECTKLG |
| | | | | NWSAMPSCKASCKVPVKKATVVYQGE |
| | | | | RVKIQEKFKNGMLHGDKVSFFCKNKEK |
| | | | | KCSYTEDAQCIDGTIEVPKCFKEHSSLA |
| | | | | FWKTDASDVKPC |
| 426 | APOD | Apolipoprotein | P05090 | MVMLLLLLSALAGLFGAAEGQAFHLG |
| | | D | | KCPNPPVQENFDVNKYLGRWYEIEKIPT |
| | | | | TFENGRCIQANYSLMENGKIKVLNQEL |
| | | | | RADGTVNQIEGEATPVNLTEPAKLEVK |
| | | | | FSWFMPSAPYWILATDYENYALVYSCT |
| | | | | CIIQLFHVDFAWILARNPNLPPETVDSL |
| | | | | KNILTSNNIDVKKMTVTDQVNCPKLS |
| 427 | TRFE | Serotransferrin | P02787 | MRLAVGALLVCAVLGLCLAVPDKTVR |
| | | | | WCAVSEHEATKCQSFRDHMKSVIPSDG |
| | | | | PSVACVKKASYLDCIRAIAANEADAVT |
| | | | | LDAGLVYDAYLAPNNLKPVVAEFYGS |
| | | | | KEDPQTFYYAVAVVKKDSGFQMNQLR |
| | | | | GKKSCHTGLGRSAGWNIPIGLLYCDLPE |
| | | | | PRKPLEKAVANFFSGSCAPCADGTDFP |
| | | | | QLCQLCPGCGCSTLNQYFGYSGAFKCL |
| | | | | KDGAGDVAFVKHSTIFENLANKADRD |
| | | | | QYELLCLDNTRKPVDEYKDCHLAQVPS |
| | | | | HTVVARSMGGKEDLIWELLNQAQEHF |
| | | | | GKDKSKEFQLFSSPHGKDLLFKDSAHG |
| | | | | FLKVPPRMDAKMYLGYEYVTAIRNLRE |
| | | | | GTCPEAPTDECKPVKWCALSHHERLKC |
| | | | | DEWSVNSVGKIECVSAETTEDCIAKIMN |
| | | | | GEADAMSLDGGFVYIAGKCGLVPVLAE |
| | | | | NYNKSDNCEDTPEAGYFAVAVVKKSA |
| | | | | SDLTWDNLKGKKSCHTAVGRTAGWNI |
| | | | | PMGLLYNKINHCRFDEFFSEGCAPGSK |
| | | | | KDSSLCKLCMGSGLNLCEPNNKEGYYG |
| | | | | YTGAFRCLVEKGDVAFVKHQTVPQNT |
| | | | | GGKNPDPWAKNLNEKDYELLCLDGTR |
| | | | | KPVEEYANCHLARAPNHAVVTRKDKE |
| | | | | ACVHKILRQQQHLFGSNVTDCSGNFCL |
| | | | | FRSETKDLLFRDDTVCLAKLHDRNTYE |
| | | | | KYLGEEYVKAVGNLRKCSTSSLLEACT |
| | | | | FRRP |
| 444 | FETUA | Alpha-2-HS- | P02765 | MKSLVLLLCLAQLWGCHSAPHGPGLIY |
| | | glycoprotein | | RQPNCDDPETEEAALVAIDYINQNLPW |
| | | | | GYKHTLNQIDEVKVWPQQPSGELFEIEI |
| | | | | DTLETTCHVLDPTPVARCSVRQLKEHA |
| | | | | VEGDCDFQLLKLDGKFSVVYAKCDSSP |
| | | | | DSAEDVRKVCQDCPLLAPLNDTRVVH |
| | | | | AAKAALAAFNAQNNGSNFQLEEISRAQ |
| | | | | LVPLPPSTYVEFTVSGTDCVAKEATEAA |
| | | | | KCNLLAEKQYGFCKATLSEKLGGAEVA |
| | | | | VTCMVFQTQPVSSQPQPEGANEAVPTP |
| | | | | VVDPDAPPSPPLGAPGLPPAGSPPDSHV |
| | | | | LLAAPPGHQLHRAHYDLRHTFMGVVS |
| | | | | LGSPSGEVSHPRKTRTVVQPSVGAAAG |
| | | | | PVVPPCPGRIRHFKV |
| 445 | A2GL | Leucine-rich | P02750 | MSSWSRQRPKSPGGIQPHVSRTLFLLLL |
| | | Alpha-2- | | LAASAWGVTLSPKDCQVFRSDHGSSIS |
| | | glycoprotein | | CQPPAEIPGYLPADTVHLAVEFFNLTHL |
| | | | | PANLLQGASKLQELHLSSNGLESLSPEF |
| | | | | LRPVPQLRVLDLTRNALTGLPPGLFQAS |
| | | | | ATLDTLVLKENQLEVLEVSWLHGLKAL |
| | | | | GHLDLSGNRLRKLPPGLLANFTLLRTLD |
| | | | | LGENQLETLPPDLLRGPLQLERLHLEGN |
| | | | | KLQVLGKDLLLPQPDLRYLFLNGNKLA |
| | | | | RVAAGAFQGLRQLDMLDLSNNSLASVP |
| | | | | EGLWASLGQPNWDMRDGFDISGNPWI |
| | | | | CDQNLSDLYRWLQAQKDKMFSQNDTR |
| | | | | CAGPEAVKGQTLLAVAKSQ |
| 446 | TTR | Transthyretin | P02766 | MASHRLLLLCLAGLVFVSEAGPTGTGE |
| | | | | SKCPLMVKVLDAVRGSPAINVAVHVFR |
| | | | | KAADDTWEPFASGKTSESGELHGLTTE |
| | | | | EEFVEGIYKVEIDTKSYWKALGISPFHE |
| | | | | HAEVVFTANDSGPRRYTIAALLSPYSYS |
| | | | | TTAVVTNPKE |
| 447 | AFAM | Afamin | P43652 | MKLLKLTGFIFFLFFLTESLTLPTQPRDI |
| | | | | ENFNSTQKFIEDNIEYITIIAFAQYVQEA |
| | | | | TFEEMEKLVKDMVEYKDRCMADKTLP |
| | | | | ECSKLPNNVLQEKICAMEGLPQKHNFS |
| | | | | HCCSKVDAQRRLCFFYNKKSDVGFLPP |
| | | | | FPTLDPEEKCQAYESNRESLLNHFLYEV |
| | | | | ARRNPFVFAPTLLTVAVHFEEVAKSCC |
| | | | | EEQNKVNCLQTRAIPVTQYLKAFSSYQ |
| | | | | KHVCGALLKFGTKVVHFIYIAILSQKFP |
| | | | | KIEFKELISLVEDVSSNYDGCCEGDVVQ |
| | | | | CIRDTSKVMNHICSKQDSISSKIKECCEK |
| | | | | KIPERGQCIINSNKDDRPKDLSLREGKFT |
| | | | | DSENVCQERDADPDTFFAKFTFEYSRR |
| | | | | HPDLSIPELLRIVQIYKDLLRNCCNTENP |
| | | | | PGCYRYAEDKFNETTEKSLKMVQQEC |
| | | | | KHFQNLGKDGLKYHYLIRLTKIAPQLST |
| | | | | EELVSLGEKMVTAFTTCCTLSEEFACV |
| | | | | DNLADLVFGELCGVNENRTINPAVDHC |
| | | | | CKTNFAFRRPCFESLKADKTYVPPPFSQ |
| | | | | DLFTFHADMCQSQNEELQRKTDRFLVN |
| | | | | LVKLKHELTDEELQSLFTNFANVVDKC |
| | | | | CKAESPEVCFNEESPKIGN |
| 448 | APOA1 | Apolipoprotein | P02647 | MKAAVLTLAVLFLTGSQARHFWQQDE |
| | | A-I | | PPQSPWDRVKDLATVYVDVLKDSGRD |
| | | C4 b-binding | | YVSQFEGSALGKQLNLKLLDNWDSVTS |
| | | | | TFSKLREQLGPVTQEFWDNLEKETEGL |
| | | | | RQEMSKDLEEVKAKVQPYLDDFQKKW |
| | | | | QEEMELYRQKVEPLRAELQEGARQKL |
| | | | | HELQEKLSPLGEEMRDRARAHVDALRT |
| | | | | HLAPYSDELRQRLAARLEALKENGGAR |
| | | | | LAEYHAKATEHLSTLSEKAKPALEDLR |
| | | | | QGLLPVLESFKVSFLSALEEYTKKLNTQ |
| | | | | MHPPKTPSGALHRKRKMAAWPFSRLW |
| | | | | KVSDPILFQMTLIAALLPAVLGNCGPPP |
| | | | | TLSFAAPMDITLTETRFKTGTTLKYTCL |
| | | | | PGYVRSHSTQTLTCNSDGEWVYNTFCI |
| | | | | YKRCRHPGELRNGQVEIKTDLSFGSQIE |
| | | | | FSCSEGFFLIGSTTSRCEVQDRGVGWSH |
| 449 | C4BPA | protein alpha | P04003 | PLPQCEIVKCKPPPDIRNGRHSGEENFY |
| | | chain | | AYGFSVTYSCDPRFSLLGHASISCTVEN |
| | | | | ETIGVWRPSPPTCEKITCRKPDVSHGEM |
| | | | | VSGFGPIYNYKDTIVFKCQKGFVLRGSS |
| | | | | VIHCDADSKWNPSPPACEPNSCINLPDIP |
| | | | | HASWETYPRPTKEDVYVVGTVLRYRC |
| | | | | HPGYKPTTDEPTTVICQKNLRWTPYQG |
| | | | | CEALCCPEPKLNNGEITQHRKSRPANHC |
| | | | | VYFYGDEISFSCHETSRFSAICQGDGTW |
| | | | | SPRTPSCGDICNFPPKIAHGHYKQSSSYS |
| | | | | FFKEEIIYECDKGYILVGQAKLSCSYSH |
| | | | | WSAPAPQCKALCRKPELVNGRLSVDK |
| | | | | DQYVEPENVTIQCDSGYGVVGPQSITCS |
| | | | | GNRTWYPEVPKCEWETPEGCEQVLTG |
| | | | | KRLMQCLPNPEDVKMALEVYKLSLEIE |
| | | | | QLELQRDSARQSTLDKEL |
| 463 | AGP2 | Alpha-1-acid | P19652 | MALSWVLTVLSLLPLLEAQIPLCANLVP |
| | | glycoprotein 2 | | VPITNATLDRITGKWFYIASAFRNEEYN |
| | | | | KSVQEIQATFFYFTPNKTEDTIFLREYQT |
| | | | | RQNQCFYNSSYLNVQRENGTVSRYEGG |
| | | | | REHVAHLLFLRDTKTLMFGSYLDDEKN |
| | | | | WGLSFYADKPETTKEQLGEFYEALDCL |
| | | | | CIPRSDVMYTDWKKDKCEPLEKQHEKE |
| | | | | RKQEEGES |
| 464 | KNG1 | Kininogen-1 | P01042 | MKLITILFLCSRLLLSLTQESQSEEIDCN |
| | | | | DKDLFKAVDAALKKYNSQNQSNNQFV |
| | | | | LYRITEATKTVGSDTFYSFKYEIKEGDC |
| | | | | PVQSGKTWQDCEYKDAAKAATGECTA |
| | | | | TVGKRSSTKFSVATQTCQITPAEGPVVT |
| | | | | AQYDCLGCVHPISTQSPDLEPILRHGIQ |
| | | | | YFNNNTQHSSLFMLNEVKRAQRQVVA |
| | | | | GLNFRITYSIVQTNCSKENFLFLTPDCKS |
| | | | | LWNGDTGECTDNAYIDIQLRIASFSQNC |
| | | | | DIYPGKDFVQPPTKICVGCPRDIPTNSPE |
| | | | | LEETLTHTITKLNAENNATFYFKIDNVK |
| | | | | KARVQVVAGKKYFIDFVARETTCSKES |
| | | | | NEELTESCETKKLGQSLDCNAEVYVVP |
| | | | | WEKKIYPTVNCQPLGMISLMKRPPGFSP |
| | | | | FRSSRIGEIKEETTVSPPHTSMAPAQDEE |
| | | | | RDSGKEQGHTRRHDWGHEKQRKHNLG |
| | | | | HGHKHERDQGHGHQRGHGLGHGHEQ |
| | | | | QHGLGHGHKFKLDDDLEHQGGHVLDH |
| | | | | GHKHKHGHGHGKHKNKGKKNGKHNG |
| | | | | WKTEHLASSSEDSTTPSAQTQEKTEGPT |
| | | | | PIPSLAKPGVTVTFSDFQDSDLIATMMP |
| | | | | PISPAPIQSDDDWIPDIQIDPNGLSFNPIS |
| | | | | DFPDTTSPKCPGRPWKSVSEINPTTQMK |
| | | | | ESYYFDLTDGLS |

[0897] Table 47 identifies and defines the glycan symbol structures included in Tables 41, 42, 43A, 43B, 43C, and 43D. Table 47 identifies a coded representation of the composition for each glycan structure included in Tables 41, 42, 43A, 43B, 43C, and 43D. As used herein, the 4-digit GL NO. is a designation that represents the number of hexoses, the number of HexNAcs, the number of Fucoses, and the number of Neuraminic Acids. It should be noted that glycan structure GL No 1102 is an O-glycan and the remaining glycans of Table 47 were N-glycans.

TABLE 47
Glycan Structure GL NOS: Composition

| Glycan | | | Glycan |
|---|---|---|---|
| Structure | Symbol | | Molecular |
| GL NO. | Structure | Composition | Weight |
| 1102 | [symbol] | Hex(1)HexNAc(1)Fuc(0)NeuAc(2) | 947.323008 |
| 3400 | [symbol] | Hex(3)HexNAc(4)Fuc(0)NeuAc(0) | 1298.47593 |
| 3410 | [symbol] | Hex(3)HexNAc(4)Fuc(1)NeuAc(0) | 1444.53384 |
| 3510 | [symbol] | Hex(3)HexNAc(5)Fuc(1)NeuAc(0) | 1647.61321 |
| 4300 | [symbol] | Hex(4)HexNAc(3)Fuc(0)NeuAc(0) | 1257.44938 |
| 4510 | [symbol] | Hex(4)HexNAc(5)Fuc(1)NeuAc(0) | 1809.66603 |
| 4511 | [symbol] | Hex(4)HexNAc(5)Fuc(1)NeuAc(1) | 2100.76144 |
| 5200 | [symbol] | Hex(5)HexNAc(2)Fuc(0)NeuAc(0) | 1216.42284 |
| 5301 | [symbol] | Hex(5)HexNAc(3)Fuc(0)NeuAc(1) | 1710.59761 |
| 5400 | [symbol] | Hex(5)HexNAc(4)Fuc(0)NeuAc(0) | 1622.58157 |
| 5401 | [symbol] | Hex(5)HexNAc(4)Fuc(0)NeuAc(1) | 1913.67698 |
| 5402 | [symbol] | Hex(5)HexNAc(4)Fuc(0)NeuAc(2) | 2204.77239 |
| 5411 | [symbol] | Hex(5)HexNAc(4)Fuc(1)NeuAc(1) | 2059.73489 |
| 5412 | [symbol] | Hex(5)HexNAc(4)Fuc(1)NeuAc(2) | 2350.8303 |
| 5421 | [symbol] | Hex(5)HexNAc(4)Fuc(2)NeuAc(1) | 2205.79279 |
| 5510 | [symbol] | Hex(5)HexNAc(5)Fuc(1)NeuAc(0) | 1971.71885 |
| 6501 | [symbol] | Hex(6)HexNAc(5)Fuc(0)NeuAc(1) | 2278.80917 |
| 6502 | [symbol] | Hex(6)HexNAc(5)Fuc(0)NeuAc(2) | 2569.90458 |
| 6503 | [symbol] | Hex(6)HexNAc(5)Fuc(0)NeuAc(3) | 2860.99999 |
| 6511 | [symbol] | Hex(6)HexNAc(5)Fuc(1)NeuAc(1) | 2424.86708 |
| 6512 | [symbol] | Hex(6)HexNAc(5)Fuc(1)NeuAc(2) | 2715.962 |
| 6513 | [symbol] | Hex(6)HexNAc(5)Fuc(1)NeuAc(3) | 3007.057896 |
| 6521 | [symbol] | Hex(6)HexNAc(5)Fuc(2)NeuAc(1) | |
| 7602 | [symbol] | Hex(7)HexNAc(6)Fuc(0)NeuAc(2) | 2935.03677 |
| 7603 | [symbol] | Hex(7)HexNAc(6)Fuc(0)NeuAc(3) | 3226.13218 |
| 7604 | [symbol] | Hex(7)HexNAc(6)Fuc(0)NeuAc(4) | 3517.227588 |
| 7612 | [symbol] | Hex(7)HexNAc(6)Fuc(1)Neu(5)Ac(2) | 3081.09467 |
| 7613 | [symbol] | Hex(7)HexNAc(6)Fuc(1)Neu(5)Ac(3) | 3372.190084 |
| 7614 | [symbol] | Hex(7)HexNAc(6)Fuc(1)NeuAc(4) | 3663.285494 |
| 8704 | [symbol] | Hex(8)HexNAc(7)Fuc(0)NeuAc(4) | 3882.35978 |
| 9804 | [symbol] | Hex(9)HexNAc(8)Fuc(0)NeuAc(4) | 4247.49196 |
| 11915 | [symbol] | Hex(11)HexNAc(9)Fuc(1)NeuAc(5) | 5211.830288 |
| 121005 | [symbol] | Hex(12)HexNAc(10)Fuc(0)NeuAc(5) | 5430.90457 |

Legend for Table 47

| | | | | |
|---|---|---|---|---|
| ● | [symbol] | [symbol] | [symbol] | [symbol] |
| Glc | Gal | Man | Fuc | Neu5Ac |
| ▪ | [symbol] | [symbol] | | |
| GlcNAc | GalNAc | ManNAc | | |

[0898] Table 47 illustrates the symbol structure and composition of detected glycan moieties that correspond to glycopeptides of Tables 41, 42, 43A, 43B, 43C, and 43D based on the Glycan GL NO. The term Symbol Structure illustrates a geometric linking structure of the carbohydrates where the bottommost carbohydrate such as N-acetylglucosamine is bound to the designated amino acid for an N-linked glycan and the rightmost carbohydrate such as N-acetylgalactosamine is bound to the designated amino acid for an O-linked glycan. It should be noted that the Glycan Structure GL NO 1102 is an O-linked glycan and that the rest of the glycans in Table 47 are N-linked glycans. For reference, N-linked glycans have a glycan attached to the amino acid asparagine and O-linked glycans have a glycan attached to either a serine or a threonine.

[0899] The identity of the various monosaccharides is illustrated by the Legend section located at the end of Table 47. The abbreviations of the Legend are Glc that represents glucose and is indicated by a dark circle, Gal that represents galactose and is indicated by an open circle, Man that represents mannose and is indicated by a circle with intermediate grey shading, Fuc that represents fucose and is indicated by a dark triangle, Neu5Ac that represents N-acetylneuraminic acid and is indicated by a dark diamond, GlcNAc that represents N-acetylglucosamine and is indicated by a dark square, GalNAc that represents N-acetylgalactosamine and is indicated by an open square, and ManNAc that represents N-acetylmannosamine and is indicated by a square with intermediate grey shading.

[0900] The term Composition refers to the number of various classes of carbohydrates that make up the glycan. The quantity for each class of carbohydrate is depicted as a number in parenthesis to the right of an abbreviation that corresponds to the class of the carbohydrate. The abbreviations for these clasess are Hex, HexNAc, Fuc, and NeuAc that respectively correspond to hexose, N-acetylhexosamine, fucose, and N-acetylneuraminic acid. It should be noted that hexose sugars include glucose, galactose, and mannose; and N-acetylhexosamine sugars includes N-acetylglucosamine, N-acetylgalactosamine, and N-acetylmannosamine. In various embodiments, the terms Neu5Ac, NeuAc, and N-acetylneuraminic acid may be referred to as sialic acid.

[0901] Referring back to Table 47, for some entries, there are two symbol structures provided for one Glycan Structure GL NO such as, for example, Glycan Structure GL NO 3510. Thus, the identify of a peptide that references a Glycan Structure GL NO that has two symbol structures could be either one of the two possibilities based on the MRM of the LC-MS analysis. In some instances, a bracket symbol is used as part of the Symbol Structure to indicate that the precise bonding linkage is not exactly known, but that the linking line segment is attached to one of the plurality of adjacent carbohydrates immediately adjacent to the bracket. For example, the fucose of Glycan Structure GL NO 3510 could have either a core fucose or an outer-arm fucose linkage.

[0902] It should be noted that glycan symbol structure can illustrate an antennary format in the form of branches. For example, Glycan Structure GL NO's 6513 and 7604 show a tri-antennary and tetra-antennary sialic acid format, respectively.

[0903] Aspects of the disclosure include kits comprising one or more compositions, each comprising one or more peptide structures of the disclosure that can be used as assay standards, and instructions for use. Kits in accordance with one or more embodiments described herein may include a label indicating the intended use of the contents of the kit. The term “label” as used herein with respect to a kit includes any writing, or recorded material supplied on or with a kit, or that otherwise accompanies a kit.

[0904] The peptide structures and the transitions produced therefrom, as described herein, may be useful for diagnosing and treating an ovarian cancer disease state. A transition includes a precursor ion and at least one product ion grouping. As reviewed herein, the peptide structures in Tables 41, 42, 43A, 43B, 43C, and 43D as well as their corresponding precursor ion and product ion groupings in Tables 44A, 44B, and 44C (these ions having defined m/z ratios or m/z ratios that fall within the m/z ranges identified herein), can be used in mass spectrometry-based analyses to diagnose and facilitate treatment of diseases, such as, for example, PC.

[0905] Aspects of the disclosure include methods for analyzing one or more peptide structures, as described herein. In some embodiments, the methods involve processing a sample from a patient to generate a prepared sample that can be inputted into a mass spectrometry system (e.g., a reaction monitoring mass spectrometry system). In certain embodiments, processing the sample can comprise performing one or more of: a denaturation procedure, a reduction procedure, an alkylation procedure, and a digestion procedure. The denaturation and reduction procedures may be implemented in a manner similar to, for example, denaturation and reduction 202 in FIG. 2. The alkylation procedure may be implemented in a manner similar to, for example, alkylation procedure 204 in FIG. 2. The digestion procedure may be implemented in a manner similar to, for example, digestion procedure 206 in FIG. 2.

[0906] In some embodiments, the methods for analyzing one or more peptide structures involve detecting a set of product ions generated by a reaction monitoring mass spectrometry system in which one or more product ions may correspond to each of the one or more peptide structures that have been inputted into the mass spectrometry system. As described herein, each peptide structure can be converted into a set of product ions having a defined m/z ratio, as provided in Tables 44A, 44B, and 44C or an m/z ratio within an identified m/z ratio as provided in Tables 44A, 44B, and 44C. In some embodiments, the methods involve generating quantification (e.g., abundance) data for the one or more product ions detected using the reaction monitoring mass spectrometry system.

[0907] In some embodiments, the methods further comprise generating a diagnosis output using the quantification data and a model that has been trained using supervised or unsupervised machine learning. In certain embodiments, the reaction monitoring mass spectrometry system may include multiple/selected reaction monitoring mass spectrometry (MRM/SRM-MS) to detect the one or more product ions and generate the quantification data.

### VIII. C. Peptide Structure and Product Ion Compositions and Kits—Melanoma

[0908] Aspects of the disclosure include compositions comprising one or more of the peptide structures listed in Table 55. In some embodiments, a composition comprises a plurality of the peptide structures listed in Table 55. In some embodiments, a composition comprises 1, 2, 3, 4, 5, 6, 7, 8, 9, 10, 11, 12, 13, 14, 15, 16, 17, 18, 19, 20, 21, 22, 23, 24, 25, 26, 27, 28, 29, 30, 31, 32, 33, 34, 35, 36, 37, or 38 of the peptide structures listed in Table 55. In some embodiments, a composition comprises a peptide structure having an amino acid sequence with at least 80% sequence identity, such as, for example, at least 81%, 82%, 83%, 84%, 85%, 86%, 87%, 88%, 89%, 90%, 91%, 92%, 93%, 94%, 95%, 96%, 97%, 98%, 99%, or 100% sequence identity to any one of SEQ ID NOS: 570-595, listed in Table 55 and defined in Table 61 below.

[0909] Aspects of the disclosure include compositions comprising one or more precursor ions having a defined charge and/or defined mass-to-charge (m/z) ratio, as listed in Table 60A. Aspects of the disclosure include compositions comprising one or more product ions having a defined mass-to-charge (m/z) ratio, which product ions are produced by converting a peptide structure described herein (e.g., a peptide structure listed in Table 55) into a gas phase ion in a mass spectrometry system. Conversion of the peptide structure into a gas phase ion can take place using any of a variety of techniques, including, but not limited to, matrix assisted laser desorption ionization (MALDI); electron ionization (EI); electrospray ionization (ESI); atmospheric pressure chemical ionization (APCI); and/or atmospheric pressure photo ionization (APPI).

[0910] Aspects of the disclosure include compositions comprising one or more product ions produced from one or more of the peptide structures described herein (e.g., a peptide structure listed in Table 55). In some embodiments, a composition comprises a set of the product ions listed in Table 55, having an m/z ratio selected from the list provided for each peptide structure in Table 55.

[0911] In some embodiments, a composition comprises at least one of peptide structures PS-330 to PS-367 identified in Table 55.

[0912] In some embodiments, a composition comprises a peptide structure or a product ion. The peptide structure or product ion comprises an amino acid sequence having at least 90% sequence identity to any one of SEQ NOs: 21-46, as identified in Table 61, corresponding to peptide structures PS-330 to PS-367 in Table 55.

[0913] In some embodiments, a composition comprises a peptide structure having a monoisotopic mass identified in Table 55 as corresponding to the peptide structure.

[0914] In some embodiments, the product ion is selected as one from a group consisting of product ions identified in Table 60A, including product ions falling within an identified m/z range of the m/z ratio identified in Table 60A and characterized as having a precursor ion having an m/z ratio within an identified m/z range of the m/z ratio identified in Table 60A. A first range for the product ion m/z ratio may be ±0.5. A second range for the product ion m/z ratio may be ±0.8. A third range for the product ion m/z ratio may be ±1.0. A first range for the precursor ion m/z ratio may be ±0.5; a second range for the precursor ion m/z ratio may be ±1.0; a third range for the precursor ion m/z ratio may be ±1.5. Thus, a composition may include a product ion having an m/z ratio that falls within at least one of the first range (±0.5), the second range (±0.8), or the third range (±1.0) of the product ion m/z ratio identified in Table 60A, and characterized as having a precursor ion having an m/z ratio that falls within at least one of a first range (±0.5), a second range (±1.0), or a third range (±1.5) of the precursor ion m/z ratio identified in Table 60A.

TABLE 60A
Mass Spectrometry-Related Characteristics for the Peptide
Structures associated with Melanoma Treatments

| | | | | | 1st | 1st | 2nd | 2nd |
|---|---|---|---|---|---|---|---|---|
| PS-ID | RT | Collision | Precursor | Precursor | Product | Product | Product | Product |
| NO. | (min) | Energy | m/z | Charge | m/z | Charge | m/z | Charge |
| 330 | 7.8 | 22 | 938.4 | 3 | 366.1 | 1 | 1392.6 | 1 |
| 331 | 13.6 | 26 | 1073.1 | 3 | 366.1 | 1 | 1360.6 | 1 |
| 332 | 8 | 20 | 1054.7 | 3 | 366.1 | 1 | 1392.6 | 1 |
| 333 | 12.7 | 20 | 976.1 | 3 | 366.1 | 1 | 1360.6 | 1 |
| 334 | 7.8 | 24 | 987.1 | 3 | 366.1 | 1 | 1392.6 | 1 |
| 335 | 13.9 | 30 | 1019.4 | 3 | 204.1 | 1 | 1360.6 | 1 |
| 336 | 11.1 | 38 | 1295.2 | 3 | 366.1 | 1 | N/A | N/A |
| 337 | 12.8 | 25 | 1043.8 | 3 | 366.1 | 1 | 1360.6 | 1 |
| 338 | 39 | 27 | 1088.6 | 5 | 366.1 | 1 | N/A | N/A |
| 339 | 13.5 | 33 | 1073.4 | 4 | 366.1 | 1 | N/A | N/A |
| 340 | 41.5 | 26 | 1075.1 | 5 | 366.1 | 1 | 1056.2 | 3 |
| 341 | 30.4 | 20 | 1004.7 | 4 | 366.1 | 1 | N/A | N/A |
| 342 | 7.9 | 21 | 884.4 | 3 | 204.1 | 1 | 1392.6 | 1 |
| 343 | 30.2 | 28 | 1173.2 | 4 | 366.1 | 1 | 978.5 | 2 |
| 344 | 25 | 35 | 1152.4 | 3 | 366.1 | 1 | N/A | N/A |
| 345 | 27.3 | 24 | 995.4 | 4 | 366.1 | 1 | N/A | N/A |
| 346 | 40.8 | 20 | 1017.3 | 5 | 366.1 | 1 | 1584.4 | 2 |
| 347 | 13 | 23 | 941.1 | 3 | 204.1 | 1 | 1360.6 | 1 |
| 348 | 38 | 32 | 1287.7 | 4 | 366.1 | 1 | N/A | N/A |
| 349 | 23.3 | 33 | 991.4 | 4 | 366.1 | 1 | N/A | N/A |
| 350 | 34.4 | 23 | 1158.8 | 4 | 1206.9 | 3 | 366.1 | 1 |
| 351 | 14.8 | 25 | 984.7 | 4 | 366.1 | 1 | N/A | N/A |
| 352 | 12.1 | 35 | 1159.4 | 3 | 366.1 | 1 | N/A | N/A |
| 353 | 29.7 | 15 | 913.4 | 4 | 366.1 | 1 | 1234 | 2 |
| 354 | 9.9 | 15 | 927.4 | 3 | 204.1 | 1 | 1376.6 | 1 |
| 355 | 30.9 | 31 | 1004.7 | 4 | 366.1 | 1 | N/A | N/A |
| 356 | 26.2 | 28 | 1131.1 | 3 | 366.1 | 1 | 840.4 | 2 |
| 357 | 36.5 | 45 | 951.5 | 2 | 1178.5 | 1 | 1293.6 | 1 |
| 358 | 31.9 | 25 | 805.4 | 3 | 994.5 | 2 | 1044 | 2 |
| 359 | 34.4 | 30 | 1199.3 | 4 | 1206.9 | 3 | 366.1 | 1 |
| 360 | 34 | 30 | 1236.1 | 4 | 366.1 | 1 | N/A | N/A |
| 361 | 23.8 | 23 | 942.4 | 3 | 366.1 | 1 | 1114.6 | 1 |
| 362 | 31.1 | 28 | 1246 | 4 | 366.1 | 1 | 978.5 | 2 |
| 363 | 13 | 27 | 1116.4 | 5 | 366.1 | 1 | N/A | N/A |
| 364 | 29.1 | 31 | 1237.3 | 3 | 366.1 | 1 | 999.5 | 2 |
| 365 | 10.5 | 25 | 1024.5 | 3 | 204.1 | 1 | 1376.6 | 1 |
| 366 | 32.7 | 30 | 1182 | 4 | 366.1 | 1 | N/A | N/A |
| 367 | 33 | 20 | 1032.9 | 4 | 366.1 | 1 | 1208.6 | 2 |

TABLE 60B
Mass Spectrometry-Related Characteristics for the Peptide Structures
of Tables 58A.1 and 58A.2 associated with NSCLC Treatments

| Pept | Monoisotopic | | Collision | 1st | 1st | 2nd | 2nd | 1st | 2nd |
|---|---|---|---|---|---|---|---|---|---|
| SEQ | mass | RT | Energy | Precursor | Precursor | Precursor | Precursor | product | product |
| ID NO | (g/mol) | (min) | (V) | m/z | charge | m/z | charge | m/z | m/z |
| 613 | 5341.2196 | 37.3 | 30 | 1336.3 | 4 | N/A | N/A | 366.1 | N/A |
| 614 | 5375.373484 | 40.5 | 20 | 1076.5 | 5 | N/A | N/A | 274.1 | N/A |
| 615 | 959.503584 | 14.4 | 13 | 480.8 | 2 | N/A | N/A | 661.4 | 404.2 |
| 616 | 1825.968604 | 32.9 | 13 | 609.7 | 3 | N/A | N/A | 692.4 | 835.9 |
| 617 | 4218.871006 | 28.9 | 25 | 1055.7 | 4 | N/A | N/A | 366.1 | 999.5 |
| 618 | 2783.116514 | 23.8 | 30 | 928.7 | 3 | N/A | N/A | 366.1 | 1114.6 |
| 619 | 3104.4044 | 27.5 | 25 | 1036.1 | 3 | N/A | N/A | 274.1 | N/A |
| 620 | 5371.203674 | 30.4 | 34 | 1343.8 | 4 | N/A | N/A | 366.1 | N/A |
| 621 | 5385.40009 | 47.1 | 35 | 1347.9 | 4 | 1078.5 | 5 | 366.1 | 274.1 |
| 622 | 1245.62746 | 19.7 | 18 | 623.8 | 2 | N/A | N/A | 747.4 | 505.2 |
| 623 | 3302.3189 | 6.3 | 30 | 1101.8 | 3 | N/A | N/A | 366.1 | N/A |
| 624 | 4735.914404 | 29.8 | 25 | 1185.5 | 4 | N/A | N/A | 366.1 | 1368.1 |
| 625 | 3259.26547 | 10 | 30 | 1087.8 | 3 | N/A | N/A | 366.1 | 1112.5 |
| 626 | 2413.147086 | 31.9 | 25 | 805.4 | 3 | N/A | N/A | 994.5 | 1044 |
| 627 | 3180.627698 | 47.4 | 20 | 796.7 | 4 | N/A | N/A | 967.5 | 820.5 |
| 628 | 4883.15735 | 33.8 | 30 | 1222.2 | 4 | N/A | N/A | 366.1 | 1441.7 |
| 629 | 865.465746 | 13.6 | 11 | 433.7 | 2 | N/A | N/A | 696.4 | 533.3 |
| 630 | 3617.469324 | 16.8 | 20 | 905.6 | 4 | N/A | N/A | 366.1 | N/A |
| 631 | 2397.969344 | 13 | 40 | 1200.5 | 2 | N/A | N/A | 204.1 | N/A |
| 632 | 4163.729062 | 23.8 | 30 | 1042.4 | 4 | N/A | N/A | 366.1 | 848.1 |

TABLE 60C
Mass Spectrometry-Related Characteristics for the Peptide Structures
of Tables 58B.1 and 58B.2 associated with NSCLC Treatments

| Pept | Monoisotopic | | Collision | 1st | 1st | 2nd | 2nd | 1st | 2nd |
|---|---|---|---|---|---|---|---|---|---|
| SEQ | mass | RT | Energy | Precursor | Precursor | Precursor | Precursor | product | product |
| ID NO | (g/mol) | (min) | (V) | m/z | charge | m/z | charge | m/z | m/z |
| 653 | 5604.493466 | 42.3 | 30 | 1122.4 | 5 | N/A | N/A | 366.1 | 1299 |
| 654 | 5895.588876 | 42.9 | 29 | 1180.6 | 5 | N/A | N/A | 366.1 | 1299 |
| 655 | 6041.646782 | 42.8 | 30 | 1209.8 | 5 | N/A | N/A | 366.1 | 1299 |
| 656 | 5969.625654 | 42 | 30 | 1195.4 | 5 | N/A | N/A | 366.1 | 1299 |
| 657 | 6260.721064 | 42.8 | 30 | 1253.6 | 5 | N/A | N/A | 366.1 | 1299 |
| 658 | 6551.816474 | 43.3 | 33 | 1311.8 | 5 | N/A | N/A | 366.1 | 1299 |
| 659 | 6406.77897 | 42.7 | 30 | 1282.9 | 5 | N/A | N/A | 366.1 | 1299 |
| 660 | 6697.87438 | 43.3 | 34 | 1341 | 5 | N/A | N/A | 366.1 | 1299 |
| 661 | 3690.816484 | 42.5 | 25 | 924.3 | 4 | N/A | N/A | 833.9 | 782.3 |
| 662 | 3668.564882 | 37.5 | 30 | 1224.5 | 3 | N/A | N/A | 366.1 | 980 |
| 663 | 3959.660292 | 38.2 | 24 | 991.2 | 4 | N/A | N/A | 366.1 | 980.5 |
| 664 | 4105.718198 | 38 | 25 | 1027.7 | 4 | N/A | N/A | 366.1 | 980 |
| 665 | 4615.88789 | 38.3 | 30 | 1155.5 | 4 | 1540.3 | 3 | 274.1 | 366.1 |
| 666 | 1754.8879 | 39.2 | 30 | 879 | 2 | N/A | N/A | 545.3 | 952.5 |
| 667 | 5744.602348 | 42.4 | 28 | 1150.3 | 5 | 958.9 | 6 | 1249.3 | 366.1 |
| 668 | 5890.660254 | 42.4 | 29 | 1179.5 | 5 | N/A | N/A | 1248.6 | 366.1 |
| 669 | 5385.40009 | 47.1 | 35 | 1347.9 | 4 | 1078.5 | 5 | 366.1 | 274.1 |
| 670 | 5531.457996 | 47 | 27 | 1107.7 | 5 | 1384.4 | 4 | 366.1 | 366.1 |
| 671 | 3180.627698 | 47.4 | 20 | 796.7 | 4 | N/A | N/A | 967.5 | 820.5 |
| 672 | 6040.44195 | 33.3 | 15 | 1209.7 | 5 | N/A | N/A | 1347.9 | 366.1 |

[0915] Table 61 defines the peptide sequences for SEQ ID NOS: 570-595 from Table 1. Table 61 further identifies a corresponding protein SEQ TD NO for each peptide sequence. Each peptide sequence in Table 61 is defined as an amino acid sequence.

TABLE 61
Peptide SEQ ID NOS

| | | Corres- |
|---|---|---|
| SEQ | | ponding |
| ID | | Protein |
| NO: | Peptide Sequence | SEQ ID NO: |
| 570 | QIPLCANLVPVPITNATLDQITGK | 453 |
| 571 | EYESYSDFERNVTEK | 454 |
| 572 | LSLHRPALEDLLLGSEANLTCTLTGLR | 555, 594 |
| 573 | LQAPLNYTEFQKPICLPSK | 456 |
| 574 | YTGNASALFILPDQDK | 457 |
| 575 | WNCWSNWSSCSGR | 454 |
| 576 | VCQDCPLLAPLNDTR | 458 |
| 577 | LANLTQGEDQYYLR | 459 |
| 578 | SLGNVNFTVSAEALESQELCGTEVPSVPEH | 460 |
| | GR | |
| 579 | IPCSQPPQIEHGTINSSR | 461 |
| 580 | ISEENETTCYMGK | 461 |
| 581 | ALPQPQNVTSLLGCTH | 462 |
| 582 | EEQYNSTFR | 562, 593 |
| 583 | GVNFNVSK | 456 |
| 584 | CGLVPVLAENYNK | 464 |
| 585 | TTPPVLDSDGSFFLYSR | 493 |
| 586 | TPEVTCVVVDVSHEDPEVQFK | 463 |
| 587 | MVSHHNLTTGATLINEQWLLTTAK | 465 |
| 588 | NGSLFAFR | 466 |
| 589 | NLFLNHSENATAK | 465 |
| 590 | VVLHPNYSQVDIGLIK | 465 |
| 591 | LPTQNITFQTESSVAEQEAEFQSPK | 467 |
| 592 | TLNQSSDELQLSMGNAMFVK | 457 |
| 593 | VTACHSSQPNATLYK | 452 |
| 594 | EEQYNSTYR | 450 |
| 595 | EEQFNSTFR | 451 |

[0916] Table 62A identifies the proteins of SEQ ID NOS: 550-569 from Table 55. Table 62A identifies a corresponding protein abbreviation and protein name for each of protein SEQ ID NOS: 550-569. Further, Table 62A identifies a corresponding Uniprot TD for each of protein SEQ ID NOS: 550-569.

TABLE 62A
Protein SEQ ID NOS

| SEQ | Protein | | |
|---|---|---|---|
| ID | Abbre- | | Uniprot |
| NO. | viation | Protein Name | ID |
| 550 | IGG1 | Immunoglobulin heavy constant gamma 1 | P01857 |
| 551 | IGG2 | Immunoglobulin heavy constant gamma 2 | P01859 |
| 552 | THBG | Thyroxine-binding globulin | P05543 |
| 553 | AGP1 | Alpha-1-acid glycoprotein 1 | P02763 |
| 554 | CO8B | Complement component C8 beta chain | P07358 |
| 555 | IGA1 | Immunoglobulin heavy constant alpha 1 | P01876 |
| 556 | KLKB1 | Plasma kallikrein | P03952 |
| 557 | AACT | Alpha-1-antichymotrypsin | P01011 |
| 558 | FETUA | Alpha-2-HS-glycoprotein | P02765 |
| 559 | CLUS | Clusterin | P10909 |
| 560 | A2MG | Alpha-2-macroglobulin | P01023 |
| 561 | CFAH | Complement factor H | P08603 |
| 562 | HEMO | Hemopexin | P02790 |
| 563 | IGG3 | Immunoglobulin heavy constant gamma 3 | P01860 |
| 564 | TRFE | Serotransferrin | P02787 |
| 565 | HPT | Haptoglobin | P00738 |
| 566 | VTNC | Vitronectin | P04004 |
| 567 | ITIH4 | Inter-alpha-trypsin inhibitor heavy chain H4 | Q14624 |
| 568 | IGG4 | Immunoglobulin heavy constant gamma 4 | P01861 |
| 569 | IGA2 | Immunoglobulin heavy constant alpha 2 | P01877 |

[0917] Table 62B identifies the proteins of SEQ ID NOS: 593-612 from Table 58A.1 and Table 58A.2. Table 62B identifies a corresponding protein abbreviation, protein name, corresponding Uniprot ID for each of protein SEQ TD NOS: 593-612.

TABLE 62B
Protein SEQ ID NOS Corresponding to Table 58A.1 and Table 58A.2

| Protein | | | | |
|---|---|---|---|---|
| SEQ ID | Protein | | Uniprot | |
| NO. | Abbreviation | Protein Name | ID | Protein Sequence |
| 593 | VTNC | Vitronectin | P04004 | MAPLRPLLILALLAWVALADQESCKGRCTEGEN |
| | | | | VDKKCQCDELCSYYQSCCTDYTAECKPQVTRGD |
| | | | | VFTMPEDEYTVYDDGEEKNNATVHEQVGGPSLT |
| | | | | SDLQAQSKGNPEQTPVLKPEEEAPAPEVGASKPE |
| | | | | GIDSRPETLHPGRPQPPAEEELCSGKPFDAFTDLK |
| | | | | NGSLFAFRGQYCYELDEKAVRPGYPKLIRDVWG |
| | | | | IEGPIDAAFTRINCQGKTYLFKGSQYWRFEDGVL |
| | | | | DPDYPRNISDGFDGIPDNVDAALALPAHSYSGRE |
| | | | | RVYFFKGKQYWEYQFQHQPSQEECEGSSLSAVF |
| | | | | EHFAMMQRDSWEDIFELLFWGRTSAGTRQPQFIS |
| | | | | RDWHGVPGQVDAAMAGRIYISGMAPRPSLAKK |
| | | | | QRFRHRNRKGYRSQRGHSRGRNQNSRRPSRAT |
| | | | | WLSLFSSEESNLGANNYDDYRMDWLVPATCEPI |
| | | | | QSVFFFSGDKYYRVNLRTRRVDTVDPPYPRSIAQ |
| | | | | YWLGCPAPGHL |
| 594 | THRB | Prothrombin | P00734 | MAHVRGLQLPGCLALAALCSLVHSQHVFLAPQQ |
| | | | | ARSLLQRVRRANTFLEEVRKGNLERECVEETCSY |
| | | | | EEAFEALESSTATDVFWAKYTACETARTPRDKL |
| | | | | AACLEGNCAEGLGTNYRGHVNITRSGIECQLWR |
| | | | | SRYPHKPEINSTTHPGADLQENFCRNPDSSTTGP |
| | | | | WCYTTDPTVRRQECSIPVCGQDQVTVAMTPRSE |
| | | | | GSSVNLSPPLEQCVPDRGQQYQGRLAVTTHGLP |
| | | | | CLAWASAQAKALSKHQDENSAVQLVENFCRNP |
| | | | | DGDEEGVWCYVAGKPGDFGYCDLNYCEEAVEE |
| | | | | ETGDGLDEDSDRAIEGRTATSEYQTFFNPRTFGS |
| | | | | GEADCGLRPLFEKKSLEDKTERELLESYIDGRIVE |
| | | | | GSDAEIGMSPWQVMLFRKSPQELLCGASLISDR |
| | | | | WVLTAAHCLLYPPWDKNFTENDLLVRIGKHSRT |
| | | | | RYERNIEKISMLEKIYIHPRYNWRENLDRDIALM |
| | | | | KLKKPVAFSDYIHPVCLPDRETAASLLQAGYKG |
| | | | | RVTGWGNLKETWTANVGKGQPSVLQVVNLPIV |
| | | | | ERPVCKDSTRIRITDNMFCAGYKPDEGKRGDAC |
| | | | | EGDSGGPFVMKSPFNNRWYQMGIVSWGEGCDR |
| | | | | DGKYGFYTHVFRLKKWIQKVIDQFGE |
| 595 | AACT | Alpha-1- | P01011 | MERMLPLLALGLLAAGFCPAVLCHPNSPLDEEN |
| | | antichymotrypsin | | LTQENQDRGTHVDLGLASANVDFAFSLYKQLVL |
| | | | | KAPDKNVIFSPLSISTALAFLSLGAHNTTLTEILKG |
| | | | | LKFNLTETSEAEIHQSFQHLLRTLNQSSDELQLSM |
| | | | | GNAMFVKEQLSLLDRFTEDAKRLYGSEAFATDF |
| | | | | QDSAAAKKLINDYVKNGTRGKITDLIKDLDSQT |
| | | | | MMVLVNYIFFKAKWEMPFDPQDTHQSRFYLSK |
| | | | | KKWVMVPMMSLHHLTIPYFRDEELSCTVVELKY |
| | | | | TGNASALFILPDQDKMEEVEAMLLPETLKRWRD |
| | | | | SLEFREIGELYLPKFSISRDYNLNDILLQLGIEEAF |
| | | | | TSKADLSGITGARNLAVSQVVHKAVLDVFEEGT |
| | | | | EASAATAVKITLLSALVETRTIVRFNRPFLMIIVPT |
| | | | | DTQNIFFMSKVTNPKQA |
| 596 | IC1 | Plasmaprotease- | P05155 | MASRLTLLTLLLLLLAGDRASSNPNATSSSSQDP |
| | | C1inhibitor | | ESLQDRGEGKVATTVISKMLFVEPILEVSSLPTTN |
| | | | | STTNSATKITANTTDEPTTQPTTEPTTQPTIQPTQP |
| | | | | TTQLPTDSPTQPTTGSFCPGPVTLCSDLESHSTEA |
| | | | | VLGDALVDFSLKLYHAFSAMKKVETNMAFSPFS |
| | | | | IASLLTQVLLGAGENTKTNLESILSYPKDFTCVHQ |
| | | | | ALKGFTTKGVTSVSQIFHSPDLAIRDTFVNASRTL |
| | | | | YSSSPRVLSNNSDANLELINTWVAKNTNNKISRL |
| | | | | LDSLPSDTRLVLLNAIYLSAKWKTTFDPKKTRME |
| | | | | PFHFKNSVIKVPMMNSKKYPVAHFIDQTLKAKV |
| | | | | GQLQLSHNLSLVILVPQNLKHRLEDMEQALSPSV |
| | | | | FKAIMEKLEMSKFQPTLLTLPRIKVTTSQDMLSI |
| | | | | MEKLEFFDFSYDLNLCGLTEDPDLQVSAMQHQT |
| | | | | VLELTETGVEAAAASAISVARTLLVFEVQQPFLF |
| | | | | VLWDQQHKFPVFMGRVYDPRA |
| 597 | HPT | Haptoglobin | P00738 | MSALGAVIALLLWGQLFAVDSGNDVTDIADDGC |
| | | | | PKPPEIAHGYVEHSVRYQCKNYYKLRTEGDGVY |
| | | | | TLNDKKQWINKAVGDKLPECEADDGCPKPPEIA |
| | | | | HGYVEHSVRYQCKNYYKLRTEGDGVYTLNNEK |
| | | | | QWINKAVGDKLPECEAVCGKPKNPANPVQRILG |
| | | | | GHLDAKGSFPWQAKMVSHHNLTTGATLINEQW |
| | | | | LLTTAKNLFLNHSENATAKDIAPTLTLYVGKKQL |
| | | | | VEIEKVVLHPNYSQVDIGLIKLKQKVSVNERVMP |
| | | | | ICLPSKDYAEVGRVGYVSGWGRNANFKFTDHLK |
| | | | | YVMLPVADQDQCIRHYEGSTVPEKKTPKSPVGV |
| | | | | QPILNEHTFCAGMSKYQEDTCYGDAGSAFAVHD |
| | | | | LEEDTWYATGILSFDKSCAVAEYGVYVKVTSIQ |
| | | | | DWVQKTIAEN |
| 598 | VTNC | Vitronectin | P04004 | MAPLRPLLILALLAWVALADQESCKGRCTEGEN |
| | | | | VDKKCQCDELCSYYQSCCTDYTAECKPQVTRGD |
| | | | | VFTMPEDEYTVYDDGEEKNNATVHEQVGGPSLT |
| | | | | SDLQAQSKGNPEQTPVLKPEEEAPAPEVGASKPE |
| | | | | GIDSRPETLHPGRPQPPAEEELCSGKPFDAFTDLK |
| | | | | NGSLFAFRGQYCYELDEKAVRPGYPKLIRDVWG |
| | | | | IEGPIDAAFTRINCQGKTYLFKGSQYWRFEDGVL |
| | | | | DPDYPRNISDGFDGIPDNVDAALALPAHSYSGRE |
| | | | | RVYFFKGKQYWEYQFQHQPSQEECEGSSLSAVF |
| | | | | EHFAMMQRDSWEDIFELLFWGRTSAGTRQPQFIS |
| | | | | RDWHGVPGQVDAAMAGRIYISGMAPRPSLAKK |
| | | | | QRFRHRNRKGYRSQRGHSRGRNQNSRRPSRAT |
| | | | | WLSLFSSEESNLGANNYDDYRMDWLVPATCEPI |
| | | | | QSVFFFSGDKYYRVNLRTRRVDTVDPPYPRSIAQ |
| | | | | YWLGCPAPGHL |
| 599 | ITIH1 | Inter-alpha- | P19827 | MDGAMGPRGLLLCMYLVSLLILQAMPALGSAT |
| | | trypsinin- | | GRSKSSEKRQAVDTAVDGVFIRSLKVNCKVTSRF |
| | | hibitorheavychain | | AHYVVTSQVVNTANEAREVAFDLEIPKTAFISDF |
| | | H1 | | AVTADGNAFIGDIKDKVTAWKQYRKAAISGENA |
| | | | | GLVRASGRTMEQFTIHLTVNPQSKVTFQLTYEEV |
| | | | | LKRNHMQYEIVIKVKPKQLVHHFEIDVDIFEPQGI |
| | | | | SKLDAQASFLPKELAAQTIKKSFSGKKGHVLFRP |
| | | | | TVSQQQSCPTCSTSLLNGHFKVTYDVSRDKICDL |
| | | | | LVANNHFAHFFAPQNLTNMNKNVVFVIDISGSM |
| | | | | RGQKVKQTKEALLKILGDMQPGDYFDLVLFGTR |
| | | | | VQSWKGSLVQASEANLQAAQDFVRGFSLDEAT |
| | | | | NLNGGLLRGIEILNQVQESLPELSNHASILIMLTD |
| | | | | GDPTEGVTDRSQILKNVRNAIRGRFPLYNLGFGH |
| | | | | NVDFNFLEVMSMENNGRAQRIYEDHDATQQLQ |
| | | | | GFYSQVAKPLLVDVDLQYPQDAVLALTQNHHK |
| | | | | QYYEGSEIVVAGRIADNKQSSFKADVQAHGEGQ |
| | | | | EFSITCLVDEEEMKKLLRERGHMLENHVERLWA |
| | | | | YLTIQELLAKRMKVDREERANLSSQALQMSLDY |
| | | | | GFVTPLTSMSIRGMADQDGLKPTIDKPSEDSPPLE |
| | | | | MLGPRRTFVLSALQPSPTHSSSNTQRLPDRVTGV |
| | | | | DTDPHFIIHVPQKEDTLCFNINEEPGVILSLVQDP |
| | | | | NTGFSVNGQLIGNKARSPGQHDGTYFGRLGIANP |
| | | | | ATDFQLEVTPQNITLNPGFGGPVFSWRDQAVLR |
| | | | | QDGVVVTINKKRNLVVSVDDGGTFEVVLHRVW |
| | | | | KGSSVHQDFLGFYVLDSHRMSARTHGLLGQFFH |
| | | | | PIGFEVSDIHPGSDPTKPDATMVVRNRRLTVTRG |
| | | | | LQKDYSKDPWHGAEVSCWFIHNNGAGLIDGAY |
| | | | | TDYIVPDIF |
| 600 | FETUA | Alpha-2-HS- | P02765 | MKSLVLLLCLAQLWGCHSAPHGPGLIYRQPNCD |
| | | glycoprotein | | DPETEEAALVAIDYINQNLPWGYKHTLNQIDEVK |
| | | | | VWPQQPSGELFEIEIDTLETTCHVLDPTPVARCSV |
| | | | | RQLKEHAVEGDCDFQLLKLDGKFSVVYAKCDSS |
| | | | | PDSAEDVRKVCQDCPLLAPLNDTRVVHAAKAAL |
| | | | | AAFNAQNNGSNFQLEEISRAQLVPLPPSTYVEFT |
| | | | | VSGTDCVAKEATEAAKCNLLAEKQYGFCKATLS |
| | | | | EKLGGAEVAVTCMVFQTQPVSSQPQPEGANEAV |
| | | | | PTPVVDPDAPPSPPLGAPGLPPAGSPPDSHVLLAA |
| | | | | PPGHQLHRAHYDLRHTFMGVVSLGSPSGEVSHP |
| | | | | RKTRTVVQPSVGAAAGPVVPPCPGRIRHFKV |
| 601 | A1AT | Alpha-1- | P01009 | MPSSVSWGILLLAGLCCLVPVSLAEDPQGDAAQ |
| | | antitrypsin | | KTDTSHHDQDHPTFNKITPNLAEFAFSLYRQLAH |
| | | | | QSNSTNIFFSPVSIATAFAMLSLGTKADTHDEILE |
| | | | | GLNFNLTEIPEAQIHEGFQELLRTLNQPDSQLQLT |
| | | | | TGNGLFLSEGLKLVDKFLEDVKKLYHSEAFTVN |
| | | | | FGDTEEAKKQINDYVEKGTQGKIVDLVKELDRD |
| | | | | TVFALVNYIFFKGKWERPFEVKDTEEEDFHVDQ |
| | | | | VTTVKVPMMKRLGMFNIQHCKKLSSWVLLMKY |
| | | | | LGNATAIFFLPDEGKLQHLENELTHDIITKFLENE |
| | | | | DRRSASLHLPKLSITGTYDLKSVLGQLGITKVFSN |
| | | | | GADLSGVTEEAPLKLSKAVHKAVLTIDEKGTEA |
| | | | | AGAMFLEAIPMSIPPEVKFNKPFVFLMIEQNTKSP |
| | | | | LFMGKVVNPTQK |
| 602 | CO6 | Complement- | P13671 | MARRSVLYFILLNALINKGQACFCDHYAWTQWT |
| | | componentC6 | | SCSKTCNSGTQSRHRQIVVDKYYQENFCEQICSK |
| | | | | QETRECNWQRCPINCLLGDFGPWSDCDPCIEKQS |
| | | | | KVRSVLRPSQFGGQPCTAPLVAFQPCIPSKLCKIE |
| | | | | EADCKNKFRCDSGRCIARKLECNGENDCGDNSD |
| | | | | ERDCGRTKAVCTRKYNPIPSVQLMGNGFHFLAG |
| | | | | EPRGEVLDNSFTGGICKTVKSSRTSNPYRVPANL |
| | | | | ENVGFEVQTAEDDLKTDFYKDLTSLGHNENQQG |
| | | | | SFSSQGGSSFSVPIFYSSKRSENINHNSAFKQAIQA |
| | | | | SHKKDSSFIRIHKVMKVLNFTTKAKDLHLSDVFL |
| | | | | KALNHLPLEYNSALYSRIFDDFGTHYFTSGSLGG |
| | | | | VYDLLYQFSSEELKNSGLTEEEAKHCVRIETKKR |
| | | | | VLFAKKTKVEHRCTTNKLSEKHEGSFIQGAEKSI |
| | | | | SLIRGGRSEYGAALAWEKGSSGLEEKTFSEWLES |
| | | | | VKENPAVIDFELAPIVDLVRNIPCAVTKRNNLRK |
| | | | | ALQEYAAKFDPCQCAPCPNNGRPTLSGTECLCV |
| | | | | CQSGTYGENCEKQSPDYKSNAVDGQWGCWSSW |
| | | | | STCDATYKRSRTRECNNPAPQRGGKRCEGEKRQ |
| | | | | EEDCTFSIMENNGQPCINDDEEMKEVDLPEIEAD |
| | | | | SGCPQPVPPENGFIRNEKQLYLVGEDVEISCLTGF |
| | | | | ETVGYQYFRCLPDGTWRQGDVECQRTECIKPVV |
| | | | | QEVLTITPFQRLYRIGESIELTCPKGFVVAGPSRY |
| | | | | TCQGNSWTPPISNSLTCEKDTLTKLKGHCQLGQK |
| | | | | QSGSECICMSPEEDCSHHSEDLCVFDTDSNDYFT |
| | | | | SPACKFLAEKCLNNQQLHFLHIGSCQDGRQLEW |
| | | | | GLERTRLSSNSTKKESCGYDTCYDWEKCSASTS |
| | | | | KCVCLLPPQCFKGGNQLYCVKMGSSTSEKTLNIC |
| | | | | EVGTIRCANRKMEILHPGKCLA |
| 603 | IGM | Immunoglobulin- | P01871 | GSASAPTLFPLVSCENSPSDTSSVAVGCLAQDFLP |
| | | heavyconstantmu | | DSITFSWKYKNNSDISSTRGFPSVLRGGKYAATS |
| | | | | QVLLPSKDVMQGTDEHVVCKVQHPNGNKEKNV |
| | | | | PLPVIAELPPKVSVFVPPRDGFFGNPRKSKLICQA |
| | | | | TGFSPRQIQVSWLREGKQVGSGVTTDQVQAEAK |
| | | | | ESGPTTYKVTSTLTIKESDWLGQSMFTCRVDHRG |
| | | | | LTFQQNASSMCVPDQDTAIRVFAIPPSFASIFLTK |
| | | | | STKLTCLVTDLTTYDSVTISWTRQNGEAVKTHT |
| | | | | NISESHPNATFSAVGEASICEDDWNSGERFTCTV |
| | | | | THTDLPSPLKQTISRPKGVALHRPDVYLLPPARE |
| | | | | QLNLRESATITCLVTGFSPADVFVQWMQRGQPL |
| | | | | SPEKYVTSAPMPEPQAPGRYFAHSILTVSEEEWN |
| | | | | TGETYTCVVAHEALPNRVTERTVDKSTGKPTLY |
| | | | | NVSLVMSDTAGTCY |
| 604 | APOM | ApolipoproteinM | O95445 | MFHQIWAALLYFYGIILNSIYQCPEHSQLTTLGV |
| | | | | DGKEFPEVHLGQWYFIAGAAPTKEELATFDPVD |
| | | | | NIVFNMAAGSAPMQLHLRATIRMKDGLCVPRK |
| | | | | WIYHLTEGSTDLRTEGRPDMKTELFSSSCPGGIM |
| | | | | LNETGQGYQRFLLYNRSPHPPEKCVEEFKSLTSC |
| | | | | LDSKAFLLTPRNQEACELSNN |
| 605 | IC1 | Plasmaprotease- | P05155 | MASRLTLLTLLLLLLAGDRASSNPNATSSSSQDP |
| | | C1inhibitor | | ESLQDRGEGKVATTVISKMLFVEPILEVSSLPTTN |
| | | | | STTNSATKITANTTDEPTTQPTTEPTTQPTIQPTQP |
| | | | | TTQLPTDSPTQPTTGSFCPGPVTLCSDLESHSTEA |
| | | | | VLGDALVDFSLKLYHAFSAMKKVETNMAFSPFS |
| | | | | IASLLTQVLLGAGENTKTNLESILSYPKDFTCVHQ |
| | | | | ALKGFTTKGVTSVSQIFHSPDLAIRDTFVNASRTL |
| | | | | YSSSPRVLSNNSDANLELINTWVAKNTNNKISRL |
| | | | | LDSLPSDTRLVLLNAIYLSAKWKTTFDPKKTRME |
| | | | | PFHFKNSVIKVPMMNSKKYPVAHFIDQTLKAKV |
| | | | | GQLQLSHNLSLVILVPQNLKHRLEDMEQALSPSV |
| | | | | FKAIMEKLEMSKFQPTLLTLPRIKVTTSQDMLSI |
| | | | | MEKLEFFDFSYDLNLCGLTEDPDLQVSAMQHQT |
| | | | | VLELTETGVEAAAASAISVARTLLVFEVQQPFLF |
| | | | | VLWDQQHKFPVFMGRVYDPRA |
| 606 | IGG3 | Immunoglobulin- | P01860 | ASTKGPSVFPLAPCSRSTSGGTAALGCLVKDYFP |
| | | heavyconstant- | | EPVTVSWNSGALTSGVHTFPAVLQSSGLYSLSSV |
| | | gamma3 | | VTVPSSSLGTQTYTCNVNHKPSNTKVDKRVELK |
| | | | | TPLGDTTHTCPRCPEPKSCDTPPPCPRCPEPKSCD |
| | | | | TPPPCPRCPEPKSCDTPPPCPRCPAPELLGGPSVFL |
| | | | | FPPKPKDTLMISRTPEVTCVVVDVSHEDPEVQFK |
| | | | | WYVDGVEVHNAKTKPREEQYNSTFRVVSVLTV |
| | | | | LHQDWLNGKEYKCKVSNKALPAPIEKTISKTKG |
| | | | | QPREPQVYTLPPSREEMTKNQVSLTCLVKGFYPS |
| | | | | DIAVEWESSGQPENNYNTTPPMLDSDGSFFLYSK |
| | | | | LTVDKSRWQQGNIFSCSVMHEALHNRFTQKSLS |
| | | | | LSPGK |
| 607 | A1AT | Alpha-1- | P01009 | MPSSVSWGILLLAGLCCLVPVSLAEDPQGDAAQ |
| | | antitrypsin | | KTDTSHHDQDHPTFNKITPNLAEFAFSLYRQLAH |
| | | | | QSNSTNIFFSPVSIATAFAMLSLGTKADTHDEILE |
| | | | | GLNFNLTEIPEAQIHEGFQELLRTLNQPDSQLQLT |
| | | | | TGNGLFLSEGLKLVDKFLEDVKKLYHSEAFTVN |
| | | | | FGDTEEAKKQINDYVEKGTQGKIVDLVKELDRD |
| | | | | TVFALVNYIFFKGKWERPFEVKDTEEEDFHVDQ |
| | | | | VTTVKVPMMKRLGMFNIQHCKKLSSWVLLMKY |
| | | | | LGNATAIFFLPDEGKLQHLENELTHDIITKFLENE |
| | | | | DRRSASLHLPKLSITGTYDLKSVLGQLGITKVFSN |
| | | | | GADLSGVTEEAPLKLSKAVHKAVLTIDEKGTEA |
| | | | | AGAMFLEAIPMSIPPEVKFNKPFVFLMIEQNTKSP |
| | | | | LFMGKVVNPTQK |
| 608 | HPT | Haptoglobin | P00738 | MSALGAVIALLLWGQLFAVDSGNDVTDIADDGC |
| | | | | PKPPEIAHGYVEHSVRYQCKNYYKLRTEGDGVY |
| | | | | TLNDKKQWINKAVGDKLPECEADDGCPKPPEIA |
| | | | | HGYVEHSVRYQCKNYYKLRTEGDGVYTLNNEK |
| | | | | QWINKAVGDKLPECEAVCGKPKNPANPVQRILG |
| | | | | GHLDAKGSFPWQAKMVSHHNLTTGATLINEQW |
| | | | | LLTTAKNLFLNHSENATAKDIAPTLTLYVGKKQL |
| | | | | VEIEKVVLHPNYSQVDIGLIKLKQKVSVNERVMP |
| | | | | ICLPSKDYAEVGRVGYVSGWGRNANFKFTDHLK |
| | | | | YVMLPVADQDQCIRHYEGSTVPEKKTPKSPVGV |
| | | | | QPILNEHTFCAGMSKYQEDTCYGDAGSAFAVHD |
| | | | | LEEDTWYATGILSFDKSCAVAEYGVYVKVTSIQ |
| | | | | DWVQKTIAEN |
| 609 | CO5 | ComplementC5 | P01031 | MGLLGILCFLIFLGKTWGQEQTYVISAPKIFRVGASEN |
| | | | | IVIQVYGYTEAFDATISIKSYPDKKFSYSSGHVHLSSE |
| | | | | NKFQNSAILTIQPKQLPGGQNPVSYVYLEVVSKHFSKS |
| | | | | KRMPITYDNGFLFIHTDKPVYTPDQSVKVRVYSLNDDL |
| | | | | KPAKRETVLTFIDPEGSEVDMVEEIDHIGIISFPDFKI |
| | | | | PSNPRYGMWTIKAKYKEDFSTTGTAYFEVKEYVLPHFS |
| | | | | VSIEPEYNFIGYKNFKNFEITIKARYFYNKVVTEADVY |
| | | | | ITFGIREDLKDDQKEMMQTAMQNTMLINGIAQVTFDSE |
| | | | | TAVKELSYYSLEDLNNKYLYIAVTVIESTGGFSEEAEI |
| | | | | PGIKYVLSPYKLNLVATPLFLKPGIPYPIKVQVKDSLD |
| | | | | QLVGGVPVTLNAQTIDVNQETSDLDPSKSVTRVDDGVA |
| | | | | SFVLNLPSGVTVLEFNVKTDAPDLPEENQAREGYRAIA |
| | | | | YSSLSQSYLYIDWTDNHKALLVGEHLNIIVTPKSPYID |
| | | | | KITHYNYLILSKGKIIHFGTREKFSDASYQSINIPVTQ |
| | | | | NMVPSSRLLVYYIVTGEQTAELVSDSVWLNIEEKCGNQ |
| | | | | LQVHLSPDADAYSPGQTVSLNMATGMDSWVALAAVDSA |
| | | | | VYGVQRGAKKPLERVFQFLEKSDLGCGAGGGLNNANVF |
| | | | | HLAGLTFLTNANADDSQENDEPCKEILRPRRTLQKKIE |
| | | | | EIAAKYKHSVVKKCCYDGACVNNDETCEQRAARISLGP |
| | | | | RCIKAFTECCVVASQLRANISHKDMQLGRLHMKTLLPV |
| | | | | SKPEIRSYFPESWLWEVHLVPRRKQLQFALPDSLTTWE |
| | | | | IQGVGISNTGICVADTVKAKVFKDVFLEMNIPYSVVRG |
| | | | | EQIQLKGTVYNYRTSGMQFCVKMSAVEGICTSESPVID |
| | | | | HQGTKSSKCVRQKVEGSSSHLVTFTVLPLEIGLHNINF |
| | | | | SLETWFGKEILVKTLRVVPEGVKRESYSGVTLDPRGIY |
| | | | | GTISRRKEFPYRIPLDLVPKTEIKRILSVKGLLVGEIL |
| | | | | SAVLSQEGINILTHLPKGSAEAELMSVVPVFYVFHYLE |
| | | | | TGNHWNIFHSDPLIEKQKLKKKLKEGMLSIMSYRNADY |
| | | | | SYSVWKGGSASTWLTAFALRVLGQVNKYVEQNONSICN |
| | | | | SLLWLVENYQLDNGSFKENSQYQPIKLQGTLPVEAREN |
| | | | | SLYLTAFTVIGIRKAFDICPLVKIDTALIKADNFLLEN |
| | | | | TLPAQSTFTLAISAYALSLGDKTHPQFRSIVSALKREA |
| | | | | LVKGNPPIYRFWKDNLQHKDSSVPNTGTARMVETTAYA |
| | | | | LLTSLNLKDINYVNPVIKWLSEEQRYGGGFYSTQDTIN |
| | | | | AIEGLTEYSLLVKQLRLSMDIDVSYKHKGALHNYKMTD |
| | | | | KNFLGRPVEVLLNDDLIVSTGFGSGLATVHVTTVVHKT |
| | | | | STSEEVCSFYLKIDTQDIEASHYRGYGNSDYKRIVACA |
| | | | | SYKPSREESSSGSSHAVMDISLPTGISANEEDLKALVE |
| | | | | GVDQLFTDYQIKDGHVILQLNSIPSSDFLCVRFRIFEL |
| | | | | FEVGFLSPATFTVYEYHRPDKQCTMFYSTSNIKIQKVC |
| | | | | EGAACKCVEADCGQMQEELDLTISAETRKQTACKPEIA |
| | | | | YAYKVSITSITVENVFVKYKATLLDIYKTGEAVAEKDS |
| | | | | EITFIKKVTCTNAELVKGRQYLIMGKEALQIKYNFSFR |
| | | | | YIYPLDSLTWIEYWPRDTTCSSCQAFLANLDEFAEDIF |
| | | | | LNGC |
| 610 | KNG1 | Kininogen-1 | P01042 | MKLITILFLCSRLLLSLTQESQSEEIDCNDKDLFK |
| | | | | AVDAALKKYNSQNQSNNQFVLYRITEATKTVGS |
| | | | | DTFYSFKYEIKEGDCPVQSGKTWQDCEYKDAAK |
| | | | | AATGECTATVGKRSSTKFSVATQTCQITPAEGPV |
| | | | | VTAQYDCLGCVHPISTQSPDLEPILRHGIQYFNNN |
| | | | | TQHSSLFMLNEVKRAQRQVVAGLNFRITYSIVQT |
| | | | | NCSKENFLFLTPDCKSLWNGDTGECTDNAYIDIQ |
| | | | | LRIASFSQNCDIYPGKDFVQPPTKICVGCPRDIPT |
| | | | | NSPELEETLTHTITKLNAENNATFYFKIDNVKKA |
| | | | | RVQVVAGKKYFIDFVARETTCSKESNEELTESCE |
| | | | | TKKLGQSLDCNAEVYVVPWEKKIYPTVNCQPLG |
| | | | | MISLMKRPPGFSPFRSSRIGEIKEETTVSPPHTSMA |
| | | | | PAQDEERDSGKEQGHTRRHDWGHEKQRKHNLG |
| | | | | HGHKHERDQGHGHQRGHGLGHGHEQQHGLGH |
| | | | | GHKFKLDDDLEHQGGHVLDHGHKHKHGHGHG |
| | | | | KHKNKGKKNGKHNGWKTEHLASSSEDSTTPSA |
| | | | | QTQEKTEGPTPIPSLAKPGVTVTFSDFQDSDLIAT |
| | | | | MMPPISPAPIQSDDDWIPDIQIDPNGLSFNPISDFP |
| | | | | DTTSPKCPGRPWKSVSEINPTTQMKESYYFDLTD |
| | | | | GLS |
| 611 | IGG2 | Immunoglobulin- | P01859 | ASTKGPSVFPLAPCSRSTSESTAALGCLVKDYFPE |
| | | heavyconstant- | | PVTVSWNSGALTSGVHTFPAVLQSSGLYSLSSVV |
| | | gamma2 | | TVPSSNFGTQTYTCNVDHKPSNTKVDKTVERKC |
| | | | | CVECPPCPAPPVAGPSVFLFPPKPKDTLMISRTPE |
| | | | | VTCVVVDVSHEDPEVQFNWYVDGVEVHNAKTK |
| | | | | PREEQFNSTFRVVSVLTVVHQDWLNGKEYKCKV |
| | | | | SNKGLPAPIEKTISKTKGQPREPQVYTLPPSREEM |
| | | | | TKNQVSLTCLVKGFYPSDISVEWESNGQPENNY |
| | | | | KTTPPMLDSDGSFFLYSKLTVDKSRWQQGNVFS |
| | | | | CSVMHEALHNHYTQKSLSLSPGK |
| 612 | IGM | Immunoglobulin- | P01871 | GSASAPTLFPLVSCENSPSDTSSVAVGCLAQDFLP |
| | | heavyconstantmu | | DSITFSWKYKNNSDISSTRGFPSVLRGGKYAATS |
| | | | | QVLLPSKDVMQGTDEHVVCKVQHPNGNKEKNV |
| | | | | PLPVIAELPPKVSVFVPPRDGFFGNPRKSKLICQA |
| | | | | TGFSPRQIQVSWLREGKQVGSGVTTDQVQAEAK |
| | | | | ESGPTTYKVTSTLTIKESDWLGQSMFTCRVDHRG |
| | | | | LTFQQNASSMCVPDQDTAIRVFAIPPSFASIFLTK |
| | | | | STKLTCLVTDLTTYDSVTISWTRQNGEAVKTHT |
| | | | | NISESHPNATFSAVGEASICEDDWNSGERFTCTV |
| | | | | THTDLPSPLKQTISRPKGVALHRPDVYLLPPARE |
| | | | | QLNLRESATITCLVTGFSPADVFVQWMQRGQPL |
| | | | | SPEKYVTSAPMPEPQAPGRYFAHSILTVSEEEWN |
| | | | | TGETYTCVVAHEALPNRVTERTVDKSTGKPTLY |
| | | | | NVSLVMSDTAGTCY |

[0918] Table 62C identifies the proteins of SEQ ID NOS: 633-652 from Table 581B.1 and Table 58B.2. Table 62C identifies a corresponding protein abbreviation, protein name, corresponding Uniprot ID for each of protein SEQ TD NOS: 633-652.

TABLE 62C
Protein SEQ ID NOS Corresponding to Table 58B.1 and Table 58B.2

| Protein | | | | |
|---|---|---|---|---|
| SEQ ID | Protein | | Uniprot | |
| NO. | Abbreviation | Protein Name | ID | ProteinSequence |
| 633 | AACT | Alpha-1- | P01011 | MERMLPLLALGLLAAGFCPAVLCHPNSPLDEEN |
| | | antichymotrypsin | | LTQENQDRGTHVDLGLASANVDFAFSLYKQLVL |
| | | | | KAPDKNVIFSPLSISTALAFLSLGAHNTTLTEILKG |
| | | | | LKFNLTETSEAEIHQSFQHLLRTLNQSSDELQLSM |
| | | | | GNAMFVKEQLSLLDRFTEDAKRLYGSEAFATDF |
| | | | | QDSAAAKKLINDYVKNGTRGKITDLIKDLDSQT |
| | | | | MMVLVNYIFFKAKWEMPFDPQDTHQSRFYLSK |
| | | | | KKWVMVPMMSLHHLTIPYFRDEELSCTVVELKY |
| | | | | TGNASALFILPDQDKMEEVEAMLLPETLKRWRD |
| | | | | SLEFREIGELYLPKFSISRDYNLNDILLQLGIEEAF |
| | | | | TSKADLSGITGARNLAVSQVVHKAVLDVFEEGT |
| | | | | EASAATAVKITLLSALVETRTIVRFNRPFLMIIVPT |
| | | | | DTQNIFFMSKVTNPKQA |
| 634 | APOM | ApolipoproteinM | O95445 | MFHQIWAALLYFYGIILNSIYQCPEHSQLTTLGV |
| | | | | DGKEFPEVHLGQWYFIAGAAPTKEELATFDPVD |
| | | | | NIVFNMAAGSAPMQLHLRATIRMKDGLCVPRK |
| | | | | WIYHLTEGSTDLRTEGRPDMKTELFSSSCPGGIM |
| | | | | LNETGQGYQRFLLYNRSPHPPEKCVEEFKSLTSC |
| | | | | LDSKAFLLTPRNQEACELSNN |
| 635 | AGP1 | Alpha-1-acid | P02763 | MALSWVLTVLSLLPLLEAQIPLCANLVPVPITNA |
| | | glycoprotein 1 | | TLDRITGKWFYIASAFRNEEYNKSVQEIQATFFYF |
| | | | | TPNKTEDTIFLREYQTRQDQCIYNTTYLNVQREN |
| | | | | GTISRYVGGQEHFAHLLILRDTKTYMLAFDVND |
| | | | | EKNWGLSVYADKPETTKEQLGEFYEALDCLRIP |
| | | | | KSDVVYTDWKKDKCEPLEKQHEKERKQEEGES |
| 636 | IC1 | Plasma protease | P05155 | MASRLTLLTLLLLLLAGDRASSNPNATSSSSQDP |
| | | C1 inhibitor | | ESLQDRGEGKVATTVISKMLFVEPILEVSSLPTTN |
| | | | | STTNSATKITANTTDEPTTQPTTEPTTQPTIQPTQP |
| | | | | TTQLPTDSPTQPTTGSFCPGPVTLCSDLESHSTEA |
| | | | | VLGDALVDFSLKLYHAFSAMKKVETNMAFSPFS |
| | | | | IASLLTQVLLGAGENTKTNLESILSYPKDFTCVHQ |
| | | | | ALKGFTTKGVTSVSQIFHSPDLAIRDTFVNASRTL |
| | | | | YSSSPRVLSNNSDANLELINTWVAKNTNNKISRL |
| | | | | LDSLPSDTRLVLLNAIYLSAKWKTTFDPKKTRME |
| | | | | PFHFKNSVIKVPMMNSKKYPVAHFIDQTLKAKV |
| | | | | GQLQLSHNLSLVILVPQNLKHRLEDMEQALSPSV |
| | | | | FKAIMEKLEMSKFQPTLLTLPRIKVTTSQDMLSI |
| | | | | MEKLEFFDFSYDLNLCGLTEDPDLQVSAMQHQT |
| | | | | VLELTETGVEAAAASAISVARTLLVFEVQQPFLF |
| | | | | VLWDQQHKFPVFMGRVYDPRA |
| 637 | AGP2 | Alpha-1-acid | P19652 | MALSWVLTVLSLLPLLEAQIPLCANLVPVPITNA |
| | | glycoprotein | | TLDRITGKWFYIASAFRNEEYNKSVQEIQATFFYF |
| | | 1or2 | | TPNKTEDTIFLREYQTRQNQCFYNSSYLNVQREN |
| | | | | GTVSRYEGGREHVAHLLFLRDTKTLMFGSYLDD |
| | | | | EKNWGLSFYADKPETTKEQLGEFYEALDCLCIPR |
| | | | | SDVMYTDWKKDKCEPLEKQHEKERKQEEGES |
| 638 | CO5 | ComplementC5 | P01031 | MGLLGILCFLIFLGKTWGQEQTYVISAPKIFRVGA |
| | | | | SENIVIQVYGYTEAFDATISIKSYPDKKFSYSSGH |
| | | | | VHLSSENKFQNSAILTIQPKQLPGGQNPVSYVYL |
| | | | | EVVSKHFSKSKRMPITYDNGFLFIHTDKPVYTPD |
| | | | | QSVKVRVYSLNDDLKPAKRETVLTFIDPEGSEVD |
| | | | | MVEEIDHIGIISFPDFKIPSNPRYGMWTIKAKYKE |
| | | | | DFSTTGTAYFEVKEYVLPHFSVSIEPEYNFIGYKN |
| | | | | FKNFEITIKARYFYNKVVTEADVYITFGIREDLKD |
| | | | | DQKEMMQTAMQNTMLINGIAQVTFDSETAVKE |
| | | | | LSYYSLEDLNNKYLYIAVTVIESTGGFSEEAEIPGI |
| | | | | KYVLSPYKLNLVATPLFLKPGIPYPIKVQVKDSL |
| | | | | DQLVGGVPVTLNAQTIDVNQETSDLDPSKSVTR |
| | | | | VDDGVASFVLNLPSGVTVLEFNVKTDAPDLPEE |
| | | | | NQAREGYRAIAYSSLSQSYLYIDWTDNHKALLV |
| | | | | GEHLNIIVTPKSPYIDKITHYNYLILSKGKIIHFGT |
| | | | | REKFSDASYQSINIPVTQNMVPSSRLLVYYIVTGE |
| | | | | QTAELVSDSVWLNIEEKCGNQLQVHLSPDADAY |
| | | | | SPGQTVSLNMATGMDSWVALAAVDSAVYGVQ |
| | | | | RGAKKPLERVFQFLEKSDLGCGAGGGLNNANVF |
| | | | | HLAGLTFLTNANADDSQENDEPCKEILRPRRTLQ |
| | | | | KKIEEIAAKYKHSVVKKCCYDGACVNNDETCEQ |
| | | | | RAARISLGPRCIKAFTECCVVASQLRANISHKDM |
| | | | | QLGRLHMKTLLPVSKPEIRSYFPESWLWEVHLVP |
| | | | | RRKQLQFALPDSLTTWEIQGVGISNTGICVADTV |
| | | | | KAKVFKDVFLEMNIPYSVVRGEQIQLKGTVYNY |
| | | | | RTSGMQFCVKMSAVEGICTSESPVIDHQGTKSSK |
| | | | | CVRQKVEGSSSHLVTFTVLPLEIGLHNINFSLETW |
| | | | | FGKEILVKTLRVVPEGVKRESYSGVTLDPRGIYG |
| | | | | TISRRKEFPYRIPLDLVPKTEIKRILSVKGLLVGEI |
| | | | | LSAVLSQEGINILTHLPKGSAEAELMSVVPVFYV |
| | | | | FHYLETGNHWNIFHSDPLIEKQKLKKKLKEGML |
| | | | | SIMSYRNADYSYSVWKGGSASTWLTAFALRVLG |
| | | | | QVNKYVEQNQNSICNSLLWLVENYQLDNGSFKE |
| | | | | NSQYQPIKLQGTLPVEARENSLYLTAFTVIGIRKA |
| | | | | FDICPLVKIDTALIKADNFLLENTLPAQSTFTLAIS |
| | | | | AYALSLGDKTHPQFRSIVSALKREALVKGNPPIY |
| | | | | RFWKDNLQHKDSSVPNTGTARMVETTAYALLTS |
| | | | | LNLKDINYVNPVIKWLSEEQRYGGGFYSTQDTIN |
| | | | | AIEGLTEYSLLVKQLRLSMDIDVSYKHKGALHN |
| | | | | YKMTDKNFLGRPVEVLLNDDLIVSTGFGSGLAT |
| | | | | VHVTTVVHKTSTSEEVCSFYLKIDTQDIEASHYR |
| | | | | GYGNSDYKRIVACASYKPSREESSSGSSHAVMDI |
| | | | | SLPTGISANEEDLKALVEGVDQLFTDYQIKDGHV |
| | | | | ILQLNSIPSSDFLCVRFRIFELFEVGFLSPATFTVYE |
| | | | | YHRPDKQCTMFYSTSNIKIQKVCEGAACKCVEA |
| | | | | DCGQMQEELDLTISAETRKQTACKPEIAYAYKVS |
| | | | | ITSITVENVFVKYKATLLDIYKTGEAVAEKDSEIT |
| | | | | FIKKVTCTNAELVKGRQYLIMGKEALQIKYNFSF |
| | | | | RYIYPLDSLTWIEYWPRDTTCSSCQAFLANLDEF |
| | | | | AEDIFLNGC |
| 639 | FETUA | Alpha-2-HS- | P02765 | MKSLVLLLCLAQLWGCHSAPHGPGLIYRQPNCD |
| | | glycoprotein | | DPETEEAALVAIDYINQNLPWGYKHTLNQIDEVK |
| | | | | VWPQQPSGELFEIEIDTLETTCHVLDPTPVARCSV |
| | | | | RQLKEHAVEGDCDFQLLKLDGKFSVVYAKCDSS |
| | | | | PDSAEDVRKVCQDCPLLAPLNDTRVVHAAKAAL |
| | | | | AAFNAQNNGSNFQLEEISRAQLVPLPPSTYVEFT |
| | | | | VSGTDCVAKEATEAAKCNLLAEKQYGFCKATLS |
| | | | | EKLGGAEVAVTCMVFQTQPVSSQPQPEGANEAV |
| | | | | PTPVVDPDAPPSPPLGAPGLPPAGSPPDSHVLLAA |
| | | | | PPGHQLHRAHYDLRHTFMGVVSLGSPSGEVSHP |
| | | | | RKTRTVVQPSVGAAAGPVVPPCPGRIRHFKV |
| 640 | FETUA | Alpha-2-HS- | P02765 | MKSLVLLLCLAQLWGCHSAPHGPGLIYRQPNCD |
| | | glycoprotein | | DPETEEAALVAIDYINQNLPWGYKHTLNQIDEVK |
| | | | | VWPQQPSGELFEIEIDTLETTCHVLDPTPVARCSV |
| | | | | RQLKEHAVEGDCDFQLLKLDGKFSVVYAKCDSS |
| | | | | PDSAEDVRKVCQDCPLLAPLNDTRVVHAAKAAL |
| | | | | AAFNAQNNGSNFQLEEISRAQLVPLPPSTYVEFT |
| | | | | VSGTDCVAKEATEAAKCNLLAEKQYGFCKATLS |
| | | | | EKLGGAEVAVTCMVFQTQPVSSQPQPEGANEAV |
| | | | | PTPVVDPDAPPSPPLGAPGLPPAGSPPDSHVLLAA |
| | | | | PPGHQLHRAHYDLRHTFMGVVSLGSPSGEVSHP |
| | | | | RKTRTVVQPSVGAAAGPVVPPCPGRIRHFKV |
| 641 | CO6 | Complement- | P13671 | MARRSVLYFILLNALINKGQACFCDHYAWTQWT |
| | | componentC6 | | SCSKTCNSGTQSRHRQIVVDKYYQENFCEQICSK |
| | | | | QETRECNWQRCPINCLLGDFGPWSDCDPCIEKQS |
| | | | | KVRSVLRPSQFGGQPCTAPLVAFQPCIPSKLCKIE |
| | | | | EADCKNKFRCDSGRCIARKLECNGENDCGDNSD |
| | | | | ERDCGRTKAVCTRKYNPIPSVQLMGNGFHFLAG |
| | | | | EPRGEVLDNSFTGGICKTVKSSRTSNPYRVPANL |
| | | | | ENVGFEVQTAEDDLKTDFYKDLTSLGHNENQQG |
| | | | | SFSSQGGSSFSVPIFYSSKRSENINHNSAFKQAIQA |
| | | | | SHKKDSSFIRIHKVMKVLNFTTKAKDLHLSDVFL |
| | | | | KALNHLPLEYNSALYSRIFDDFGTHYFTSGSLGG |
| | | | | VYDLLYQFSSEELKNSGLTEEEAKHCVRIETKKR |
| | | | | VLFAKKTKVEHRCTTNKLSEKHEGSFIQGAEKSI |
| | | | | SLIRGGRSEYGAALAWEKGSSGLEEKTFSEWLES |
| | | | | VKENPAVIDFELAPIVDLVRNIPCAVTKRNNLRK |
| | | | | ALQEYAAKFDPCQCAPCPNNGRPTLSGTECLCV |
| | | | | CQSGTYGENCEKQSPDYKSNAVDGQWGCWSSW |
| | | | | STCDATYKRSRTRECNNPAPQRGGKRCEGEKRQ |
| | | | | EEDCTFSIMENNGQPCINDDEEMKEVDLPEIEAD |
| | | | | SGCPQPVPPENGFIRNEKQLYLVGEDVEISCLTGF |
| | | | | ETVGYQYFRCLPDGTWRQGDVECQRTECIKPVV |
| | | | | QEVLTITPFQRLYRIGESIELTCPKGFVVAGPSRY |
| | | | | TCQGNSWTPPISNSLTCEKDTLTKLKGHCQLGQK |
| | | | | QSGSECICMSPEEDCSHHSEDLCVFDTDSNDYFT |
| | | | | SPACKFLAEKCLNNQQLHFLHIGSCQDGRQLEW |
| | | | | GLERTRLSSNSTKKESCGYDTCYDWEKCSASTS |
| | | | | KCVCLLPPQCFKGGNQLYCVKMGSSTSEKTLNIC |
| | | | | EVGTIRCANRKMEILHPGKCLA |
| 642 | HPT | Haptoglobin | P00738 | MSALGAVIALLLWGQLFAVDSGNDVTDIADDGC |
| | | | | PKPPEIAHGYVEHSVRYQCKNYYKLRTEGDGVY |
| | | | | TLNDKKQWINKAVGDKLPECEADDGCPKPPEIA |
| | | | | HGYVEHSVRYQCKNYYKLRTEGDGVYTLNNEK |
| | | | | QWINKAVGDKLPECEAVCGKPKNPANPVQRILG |
| | | | | GHLDAKGSFPWQAKMVSHHNLTTGATLINEQW |
| | | | | LLTTAKNLFLNHSENATAKDIAPTLTLYVGKKQL |
| | | | | VEIEKVVLHPNYSQVDIGLIKLKQKVSVNERVMP |
| | | | | ICLPSKDYAEVGRVGYVSGWGRNANFKFTDHLK |
| | | | | YVMLPVADQDQCIRHYEGSTVPEKKTPKSPVGV |
| | | | | QPILNEHTFCAGMSKYQEDTCYGDAGSAFAVHD |
| | | | | LEEDTWYATGILSFDKSCAVAEYGVYVKVTSIQ |
| | | | | DWVQKTIAEN |
| 643 | APOB | Apolipoprotein | P04114 | MDPPRPALLALLALPALLLLLLAGARAEEEMLE |
| | | B-100 | | NVSLVCPKDATRFKHLRKYTYNYEAESSSGVPG |
| | | | | TADSRSATRINCKVELEVPQLCSFILKTSQCTLKE |
| | | | | VYGFNPEGKALLKKTKNSEEFAAAMSRYELKLA |
| | | | | IPEGKQVFLYPEKDEPTYILNIKRGIISALLVPPET |
| | | | | EEAKQVLFLDTVYGNCSTHFTVKTRKGNVATEIS |
| | | | | TERDLGQCDRFKPIRTGISPLALIKGMTRPLSTLIS |
| | | | | SSQSCQYTLDAKRKHVAEAICKEQHLFLPFSYKN |
| | | | | KYGMVAQVTQTLKLEDTPKINSRFFGEGTKKMG |
| | | | | LAFESTKSTSPPKQAEAVLKTLQELKKLTISEQNI |
| | | | | QRANLFNKLVTELRGLSDEAVTSLLPQLIEVSSPI |
| | | | | TLQALVQCGQPQCSTHILQWLKRVHANPLLIDV |
| | | | | VTYLVALIPEPSAQQLREIFNMARDQRSRATLYA |
| | | | | LSHAVNNYHKTNPTGTQELLDIANYLMEQIQDD |
| | | | | CTGDEDYTYLILRVIGNMGQTMEQLTPELKSSIL |
| | | | | KCVQSTKPSLMIQKAAIQALRKMEPKDKDQEVL |
| | | | | LQTFLDDASPGDKRLAAYLMLMRSPSQADINKI |
| | | | | VQILPWEQNEQVKNFVASHIANILNSEELDIQDL |
| | | | | KKLVKEALKESQLPTVMDFRKFSRNYQLYKSVS |
| | | | | LPSLDPASAKIEGNLIFDPNNYLPKESMLKTTLTA |
| | | | | FGFASADLIEIGLEGKGFEPTLEALFGKQGFFPDS |
| | | | | VNKALYWVNGQVPDGVSKVLVDHFGYTKDDK |
| | | | | HEQDMVNGIMLSVEKLIKDLKSKEVPEARAYLRI |
| | | | | LGEELGFASLHDLQLLGKLLLMGARTLQGIPQMI |
| | | | | GEVIRKGSKNDFFLHYIFMENAFELPTGAGLQLQ |
| | | | | ISSSGVIAPGAKAGVKLEVANMQAELVAKPSVS |
| | | | | VEFVTNMGIIIPDFARSGVQMNTNFFHESGLEAH |
| | | | | VALKAGKLKFIIPSPKRPVKLLSGGNTLHLVSTTK |
| | | | | TEVIPPLIENRQSWSVCKQVFPGLNYCTSGAYSN |
| | | | | ASSTDSASYYPLTGDTRLELELRPTGEIEQYSVSA |
| | | | | TYELQREDRALVDTLKFVTQAEGAKQTEATMTF |
| | | | | KYNRQSMTLSSEVQIPDFDVDLGTILRVNDESTE |
| | | | | GKTSYRLTLDIQNKKITEVALMGHLSCDTKEERK |
| | | | | IKGVISIPRLQAEARSEILAHWSPAKLLLQMDSSA |
| | | | | TAYGSTVSKRVAWHYDEEKIEFEWNTGTNVDT |
| | | | | KKMTSNFPVDLSDYPKSLHMYANRLLDHRVPQT |
| | | | | DMTFRHVGSKLIVAMSSWLQKASGSLPYTQTLQ |
| | | | | DHLNSLKEFNLQNMGLPDFHIPENLFLKSDGRVK |
| | | | | YTLNKNSLKIEIPLPFGGKSSRDLKMLETVRTPAL |
| | | | | HFKSVGFHLPSREFQVPTFTIPKLYQLQVPLLGVL |
| | | | | DLSTNVYSNLYNWSASYSGGNTSTDHFSLRARY |
| | | | | HMKADSVVDLLSYNVQGSGETTYDHKNTFTLSY |
| | | | | DGSLRHKFLDSNIKFSHVEKLGNNPVSKGLLIFD |
| | | | | ASSSWGPQMSASVHLDSKKKQHLFVKEVKIDGQ |
| | | | | FRVSSFYAKGTYGLSCQRDPNTGRLNGESNLRFN |
| | | | | SSYLQGTNQITGRYEDGTLSLTSTSDLQSGIIKNT |
| | | | | ASLKYENYELTLKSDTNGKYKNFATSNKMDMT |
| | | | | FSKQNALLRSEYQADYESLRFFSLLSGSLNSHGL |
| | | | | ELNADILGTDKINSGAHKATLRIGQDGISTSATTN |
| | | | | LKCSLLVLENELNAELGLSGASMKLTTNGRFRE |
| | | | | HNAKFSLDGKAALTELSLGSAYQAMILGVDSKN |
| | | | | IFNFKVSQEGLKLSNDMMGSYAEMKFDHTNSLN |
| | | | | IAGLSLDFSSKLDNIYSSDKFYKQTVNLQLQPYSL |
| | | | | VTTLNSDLKYNALDLTNNGKLRLEPLKLHVAGN |
| | | | | LKGAYQNNEIKHIYAISSAALSASYKADTVAKVQ |
| | | | | GVEFSHRLNTDIAGLASAIDMSTNYNSDSLHFSN |
| | | | | VFRSVMAPFTMTIDAHTNGNGKLALWGEHTGQ |
| | | | | LYSKFLLKAEPLAFTFSHDYKGSTSHHLVSRKSIS |
| | | | | AALEHKVSALLTPAEQTGTWKLKTQFNNNEYSQ |
| | | | | DLDAYNTKDKIGVELTGRTLADLTLLDSPIKVPL |
| | | | | LLSEPINIIDALEMRDAVEKPQEFTIVAFVKYDKN |
| | | | | QDVHSINLPFFETLQEYFERNRQTIIVVLENVQRN |
| | | | | LKHINIDQFVRKYRAALGKLPQQANDYLNSFNW |
| | | | | ERQVSHAKEKLTALTKKYRITENDIQIALDDAKI |
| | | | | NFNEKLSQLQTYMIQFDQYIKDSYDLHDLKIAIA |
| | | | | NIIDEIIEKLKSLDEHYHIRVNLVKTIHDLHLFIENI |
| | | | | DFNKSGSSTASWIQNVDTKYQIRIQIQEKLQQLK |
| | | | | RHIQNIDIQHLAGKLKQHIEAIDVRVLLDQLGTTI |
| | | | | SFERINDILEHVKHFVINLIGDFEVAEKINAFRAK |
| | | | | VHELIERYEVDQQIQVLMDKLVELAHQYKLKETI |
| | | | | QKLSNVLQQVKIKDYFEKLVGFIDDAVKKLNEL |
| | | | | SFKTFIEDVNKFLDMLIKKLKSFDYHQFVDETND |
| | | | | KIREVTQRLNGEIQALELPQKAEALKLFLEETKA |
| | | | | TVAVYLESLQDTKITLIINWLQEALSSASLAHMK |
| | | | | AKFRETLEDTRDRMYQMDIQQELQRYLSLVGQV |
| | | | | YSTLVTYISDWWTLAAKNLTDFAEQYSIQDWAK |
| | | | | RMKALVEQGFTVPEIKTILGTMPAFEVSLQALQK |
| | | | | ATFQTPDFIVPLTDLRIPSVQINFKDLKNIKIPSRFS |
| | | | | TPEFTILNTFHIPSFTIDFVEMKVKIIRTIDQMLNSE |
| | | | | LQWPVPDIYLRDLKVEDIPLARITLPDFRLPEIAIP |
| | | | | EFIIPTLNLNDFQVPDLHIPEFQLPHISHTIEVPTFG |
| | | | | KLYSILKIQSPLFTLDANADIGNGTTSANEAGIAA |
| | | | | SITAKGESKLEVLNFDFQANAQLSNPKINPLALK |
| | | | | ESVKFSSKYLRTEHGSEMLFFGNAIEGKSNTVAS |
| | | | | LHTEKNTLELSNGVIVKINNQLTLDSNTKYFHKL |
| | | | | NIPKLDFSSQADLRNEIKTLLKAGHIAWTSSGKG |
| | | | | SWKWACPRFSDEGTHESQISFTIEGPLTSFGLSNK |
| | | | | INSKHLRVNQNLVYESGSLNFSKLEIQSQVDSQH |
| | | | | VGHSVLTAKGMALFGEGKAEFTGRHDAHLNGK |
| | | | | VIGTLKNSLFFSAQPFEITASTNNEGNLKVRFPLR |
| | | | | LTGKIDFLNNYALFLSPSAQQASWQVSARFNQY |
| | | | | KYNQNFSAGNNENIMEAHVGINGEANLDFLNIPL |
| | | | | TIPEMRLPYTIITTPPLKDFSLWEKTGLKEFLKTT |
| | | | | KQSFDLSVKAQYKKNKHRHSITNPLAVLCEFISQ |
| | | | | SIKSFDRHFEKNRNNALDFVTKSYNETKIKFDKY |
| | | | | KAEKSHDELPRTFQIPGYTVPVVNVEVSPFTIEMS |
| | | | | AFGYVFPKAVSMPSFSILGSDVRVPSYTLILPSLE |
| | | | | LPVLHVPRNLKLSLPDFKELCTISHIFIPAMGNITY |
| | | | | DFSFKSSVITLNTNAELFNQSDIVAHLLSSSSSVID |
| | | | | ALQYKLEGTTRLTRKRGLKLATALSLSNKFVEGS |
| | | | | HNSTVSLTTKNMEVSVATTTKAQIPILRMNFKQE |
| | | | | LNGNTKSKPTVSSSMEFKYDFNSSMLYSTAKGA |
| | | | | VDHKLSLESLTSYFSIESSTKGDVKGSVLSREYSG |
| | | | | TIASEANTYLNSKSTRSSVKLQGTSKIDDIWNLEV |
| | | | | KENFAGEATLQRIYSLWEHSTKNHLQLEGLFFTN |
| | | | | GEHTSKATLELSPWQMSALVQVHASQPSSFHDF |
| | | | | PDLGQEVALNANTKNQKIRWKNEVRIHSGSFQS |
| | | | | QVELSNDQEKAHLDIAGSLEGHLRFLKNIILPVY |
| | | | | DKSLWDFLKLDVTTSIGRRQHLRVSTAFVYTKN |
| | | | | PNGYSFSIPVKVLADKFIIPGLKLNDLNSVLVMPT |
| | | | | FHVPFTDLQVPSCKLDFREIQIYKKLRTSSFALNL |
| | | | | PTLPEVKFPEVDVLTKYSQPEDSLIPFFEITVPESQ |
| | | | | LTVSQFTLPKSVSDGIAALDLNAVANKIADFELP |
| | | | | TIIVPEQTIEIPSIKFSVPAGIVIPSFQALTARFEVDS |
| | | | | PVYNATWSASLKNKADYVETVLDSTCSSTVQFL |
| | | | | EYELNVLGTHKIEDGTLASKTKGTFAHRDFSAEY |
| | | | | EEDGKYEGLQEWEGKAHLNIKSPAFTDLHLRYQ |
| | | | | KDKKGISTSAASPAVGTVGMDMDEDDDFSKWN |
| | | | | FYYSPQSSPDKKLTIFKTELRVRESDEETQIKVNW |
| | | | | EEEAASGLLTSLKDNVPKATGVLYDYVNKYHW |
| | | | | EHTGLTLREVSSKLRRNLQNNAEWVYQGAIRQI |
| | | | | DDIDVRFQKAASGTTGTYQEWKDKAQNLYQEL |
| | | | | LTQEGQASFQGLKDNVFDGLVRVTQEFHMKVK |
| | | | | HLIDSLIDFLNFPRFQFPGKPGIYTREELCTMFIRE |
| | | | | VGTVLSQVYSKVHNGSEILFSYFQDLVITLPFELR |
| | | | | KHKLIDVISMYRELLKDLSKEAQEVFKAIQSLKT |
| | | | | TEVLRNLQDLLQFIFQLIEDNIKQLKEMKFTYLIN |
| | | | | YIQDEINTIFSDYIPYVFKLLKENLCLNLHKFNEFI |
| | | | | QNELQEASQELQQIHQYIMALREEYFDPSIVGWT |
| | | | | VKYYELEEKIVSLIKNLLVALKDFHSEYIVSASNF |
| | | | | TSQLSSQVEQFLHRNIQEYLSILTDPDGKGKEKIA |
| | | | | ELSATAQEIIKSQAIATKKIISDYHQQFRYKLQDF |
| | | | | SDQLSDYYEKFIAESKRLIDLSIQNYHTFLIYITEL |
| | | | | LKKLQSTTVMNPYMKLAPGELTIIL |
| 644 | HPT | Haptoglobin | P00738 | MSALGAVIALLLWGQLFAVDSGNDVTDIADDGC |
| | | | | PKPPEIAHGYVEHSVRYQCKNYYKLRTEGDGVY |
| | | | | TLNDKKQWINKAVGDKLPECEADDGCPKPPEIA |
| | | | | HGYVEHSVRYQCKNYYKLRTEGDGVYTLNNEK |
| | | | | QWINKAVGDKLPECEAVCGKPKNPANPVQRILG |
| | | | | GHLDAKGSFPWQAKMVSHHNLTTGATLINEQW |
| | | | | LLTTAKNLFLNHSENATAKDIAPTLTLYVGKKQL |
| | | | | VEIEKVVLHPNYSQVDIGLIKLKQKVSVNERVMP |
| | | | | ICLPSKDYAEVGRVGYVSGWGRNANFKFTDHLK |
| | | | | YVMLPVADQDQCIRHYEGSTVPEKKTPKSPVGV |
| | | | | QPILNEHTFCAGMSKYQEDTCYGDAGSAFAVHD |
| | | | | LEEDTWYATGILSFDKSCAVAEYGVYVKVTSIQ |
| | | | | DWVQKTIAEN |
| 645 | HPT | Haptoglobin | P00738 | MSALGAVIALLLWGQLFAVDSGNDVTDIADDGC |
| | | | | PKPPEIAHGYVEHSVRYQCKNYYKLRTEGDGVY |
| | | | | TLNDKKQWINKAVGDKLPECEADDGCPKPPEIA |
| | | | | HGYVEHSVRYQCKNYYKLRTEGDGVYTLNNEK |
| | | | | QWINKAVGDKLPECEAVCGKPKNPANPVQRILG |
| | | | | GHLDAKGSFPWQAKMVSHHNLTTGATLINEQW |
| | | | | LLTTAKNLFLNHSENATAKDIAPTLTLYVGKKQL |
| | | | | VEIEKVVLHPNYSQVDIGLIKLKQKVSVNERVMP |
| | | | | ICLPSKDYAEVGRVGYVSGWGRNANFKFTDHLK |
| | | | | YVMLPVADQDQCIRHYEGSTVPEKKTPKSPVGV |
| | | | | QPILNEHTFCAGMSKYQEDTCYGDAGSAFAVHD |
| | | | | LEEDTWYATGILSFDKSCAVAEYGVYVKVTSIQ |
| | | | | DWVQKTIAEN |
| 646 | A1AT | Alpha-1- | P01009 | MPSSVSWGILLLAGLCCLVPVSLAEDPQGDAAQ |
| | | antitrypsin | | KTDTSHHDQDHPTFNKITPNLAEFAFSLYRQLAH |
| | | | | QSNSTNIFFSPVSIATAFAMLSLGTKADTHDEILE |
| | | | | GLNFNLTEIPEAQIHEGFQELLRTLNQPDSQLQLT |
| | | | | TGNGLFLSEGLKLVDKFLEDVKKLYHSEAFTVN |
| | | | | FGDTEEAKKQINDYVEKGTQGKIVDLVKELDRD |
| | | | | TVFALVNYIFFKGKWERPFEVKDTEEEDFHVDQ |
| | | | | VTTVKVPMMKRLGMFNIQHCKKLSSWVLLMKY |
| | | | | LGNATAIFFLPDEGKLQHLENELTHDIITKFLENE |
| | | | | DRRSASLHLPKLSITGTYDLKSVLGQLGITKVFSN |
| | | | | GADLSGVTEEAPLKLSKAVHKAVLTIDEKGTEA |
| | | | | AGAMFLEAIPMSIPPEVKFNKPFVFLMIEQNTKSP |
| | | | | LFMGKVVNPTQK |
| 647 | IGM | Immunoglobulin | P01871 | GSASAPTLFPLVSCENSPSDTSSVAVGCLAQDFLP |
| | | heavy | | DSITFSWKYKNNSDISSTRGFPSVLRGGKYAATS |
| | | constant mu | | QVLLPSKDVMQGTDEHVVCKVQHPNGNKEKNV |
| | | | | PLPVIAELPPKVSVFVPPRDGFFGNPRKSKLICQA |
| | | | | TGFSPRQIQVSWLREGKQVGSGVTTDQVQAEAK |
| | | | | ESGPTTYKVTSTLTIKESDWLGQSMFTCRVDHRG |
| | | | | LTFQQNASSMCVPDQDTAIRVFAIPPSFASIFLTK |
| | | | | STKLTCLVTDLTTYDSVTISWTRQNGEAVKTHT |
| | | | | NISESHPNATFSAVGEASICEDDWNSGERFTCTV |
| | | | | THTDLPSPLKQTISRPKGVALHRPDVYLLPPARE |
| | | | | QLNLRESATITCLVTGFSPADVFVQWMQRGQPL |
| | | | | SPEKYVTSAPMPEPQAPGRYFAHSILTVSEEEWN |
| | | | | TGETYTCVVAHEALPNRVTERTVDKSTGKPTLY |
| | | | | NVSLVMSDTAGTCY |
| 648 | IC1 | Plasma protease | P05155 | MASRLTLLTLLLLLLAGDRASSNPNATSSSSQDP |
| | | C1 inhibitor | | ESLQDRGEGKVATTVISKMLFVEPILEVSSLPTTN |
| | | | | STTNSATKITANTTDEPTTQPTTEPTTQPTIQPTQP |
| | | | | TTQLPTDSPTQPTTGSFCPGPVTLCSDLESHSTEA |
| | | | | VLGDALVDFSLKLYHAFSAMKKVETNMAFSPFS |
| | | | | IASLLTQVLLGAGENTKTNLESILSYPKDFTCVHQ |
| | | | | ALKGFTTKGVTSVSQIFHSPDLAIRDTFVNASRTL |
| | | | | YSSSPRVLSNNSDANLELINTWVAKNTNNKISRL |
| | | | | LDSLPSDTRLVLLNAIYLSAKWKTTFDPKKTRME |
| | | | | PFHFKNSVIKVPMMNSKKYPVAHFIDQTLKAKV |
| | | | | GQLQLSHNLSLVILVPQNLKHRLEDMEQALSPSV |
| | | | | FKAIMEKLEMSKFQPTLLTLPRIKVTTSQDMLSI |
| | | | | MEKLEFFDFSYDLNLCGLTEDPDLQVSAMQHQT |
| | | | | VLELTETGVEAAAASAISVARTLLVFEVQQPFLF |
| | | | | VLWDQQHKFPVFMGRVYDPRA |
| 649 | APOH | Beta-2- | P02749 | MISPVLILFSSFLCHVAIAGRTCPKPDDLPFSTVVP |
| | | glycoprotein 1 | | LKTFYEPGEEITYSCKPGYVSRGGMRKFICPLTGL |
| | | | | WPINTLKCTPRVCPFAGILENGAVRYTTFEYPNTI |
| | | | | SFSCNTGFYLNGADSAKCTEEGKWSPELPVCAPII |
| | | | | CPPPSIPTFATLRVYKPSAGNNSLYRDTAVFECLP |
| | | | | QHAMFGNDTITCTTHGNWTKLPECREVKCPFPS |
| | | | | RPDNGFVNYPAKPTLYYKDKATFGCHDGYSLDG |
| | | | | PEEIECTKLGNWSAMPSCKASCKVPVKKATVVY |
| | | | | QGERVKIQEKFKNGMLHGDKVSFFCKNKEKKCS |
| | | | | YTEDAQCIDGTIEVPKCFKEHSSLAFWKTDASDV |
| | | | | KPC |
| 650 | FETUA | Alpha-2-HS- | P02765 | MKSLVLLLCLAQLWGCHSAPHGPGLIYRQPNCD |
| | | glycoprotein | | DPETEEAALVAIDYINQNLPWGYKHTLNQIDEVK |
| | | | | VWPQQPSGELFEIEIDTLETTCHVLDPTPVARCSV |
| | | | | RQLKEHAVEGDCDFQLLKLDGKFSVVYAKCDSS |
| | | | | PDSAEDVRKVCQDCPLLAPLNDTRVVHAAKAAL |
| | | | | AAFNAQNNGSNFQLEEISRAQLVPLPPSTYVEFT |
| | | | | VSGTDCVAKEATEAAKCNLLAEKQYGFCKATLS |
| | | | | EKLGGAEVAVTCMVFQTQPVSSQPQPEGANEAV |
| | | | | PTPVVDPDAPPSPPLGAPGLPPAGSPPDSHVLLAA |
| | | | | PPGHQLHRAHYDLRHTFMGVVSLGSPSGEVSHP |
| | | | | RKTRTVVQPSVGAAAGPVVPPCPGRIRHFKV |
| 651 | KLKB1 | Plasma | P03952 | MILFKQATYFISLFATVSCGCLTQLYENAFFRGG |
| | | Kallikrein | | DVASMYTPNAQYCQMRCTFHPRCLLFSFLPASSI |
| | | | | NDMEKRFGCFLKDSVTGTLPKVHRTGAVSGHSL |
| | | | | KQCGHQISACHRDIYKGVDMRGVNFNVSKVSSV |
| | | | | EECQKRCTNNIRCQFFSYATQTFHKAEYRNNCLL |
| | | | | KYSPGGTPTAIKVLSNVESGFSLKPCALSEIGCHM |
| | | | | NIFQHLAFSDVDVARVLTPDAFVCRTICTYHPNC |
| | | | | LFFTFYTNVWKIESQRNVCLLKTSESGTPSSSTPQ |
| | | | | ENTISGYSLLTCKRTLPEPCHSKIYPGVDFGGEEL |
| | | | | NVTFVKGVNVCQETCTKMIRCQFFTYSLLPEDC |
| | | | | KEEKCKCFLRLSMDGSPTRIAYGTQGSSGYSLRL |
| | | | | CNTGDNSVCTTKTSTRIVGGTNSSWGEWPWQVS |
| | | | | LQVKLTAQRHLCGGSLIGHQWVLTAAHCFDGLP |
| | | | | LQDVWRIYSGILNLSDITKDTPFSQIKEIIIHQNYK |
| | | | | VSEGNHDIALIKLQAPLNYTEFQKPICLPSKGDTS |
| | | | | TIYTNCWVTGWGFSKEKGEIQNILQKVNIPLVTN |
| | | | | EECQKRYQDYKITQRMVCAGYKEGGKDACKGD |
| 652 | VTNC | Vitronectin | P04004 | SGGPLVCKHNGMWRLVGITSWGEGCARREQPG |
| | | | | VYTKVAEYMDWILEKTQSSDGKAQMQSPA |
| | | | | MAPLRPLLILALLAWVALADQESCKGRCTEGEN |
| | | | | VDKKCQCDELCSYYQSCCTDYTAECKPQVTRGD |
| | | | | VFTMPEDEYTVYDDGEEKNNATVHEQVGGPSLT |
| | | | | SDLQAQSKGNPEQTPVLKPEEEAPAPEVGASKPE |
| | | | | GIDSRPETLHPGRPQPPAEEELCSGKPFDAFTDLK |
| | | | | NGSLFAFRGQYCYELDEKAVRPGYPKLIRDVWG |
| | | | | IEGPIDAAFTRINCQGKTYLFKGSQYWRFEDGVL |
| | | | | DPDYPRNISDGFDGIPDNVDAALALPAHSYSGRE |
| | | | | RVYFFKGKQYWEYQFQHQPSQEECEGSSLSAVF |
| | | | | EHFAMMQRDSWEDIFELLFWGRTSAGTRQPQFIS |
| | | | | RDWHGVPGQVDAAMAGRIYISGMAPRPSLAKK |
| | | | | QRFRHRNRKGYRSQRGHSRGRNQNSRRPSRAT |
| | | | | WLSLFSSEESNLGANNYDDYRMDWLVPATCEPI |
| | | | | QSVFFFSGDKYYRVNLRTRRVDTVDPPYPRSIAQ |
| | | | | YWLGCPAPGHL |

[0919] Table 63 identifies and defines the glycan structures from Table 55. Table 63 identifies a graphical representation of the structure and a coded representation of the composition for each glycan structure included in Table 55. As used herein, the 4-digit GL NO. is a designation that represents the number of hexoses, the number of HexNAcs, the number of Fucoses, and the number of Neuraminic Acids. Table 63 and Table 76 collectively identify and define the glycan structures from Table 58A.1 and Table 58B.1.

TABLE 63
Glycan Structure GL NOS: Structure and Composition

| Glycan Structure | | |
|---|---|---|
| GL NO. | Structure | Composition |
| 3310 | [symbol] | Hex(3)HexNAc(3)Fuc(1)NeuAc(0) |
| 4400 | [symbol] | Hex(4)HexNAc(4)Fuc(0)NeuAc(0) |
| 4410 | [symbol] | Hex(4)HexNAc(4)Fuc(1)NeuAc(0) |
| 4411 | [symbol] | Hex(4)HexNAc(4)Fuc(1)NeuAc(1) |
| 4500 | [symbol] | Hex(4)HexNAc(5)Fuc(0)NeuAc(0) |
| 5200 | [symbol] | Hex(5)HexNAc(2)Fuc(0)NeuAc(0) |
| 5400 | [symbol] | Hex(5)HexNAc(4)Fuc(0)NeuAc(0) |
| 5401 | [symbol] | Hex(5)HexNAc(4)Fuc(0)NeuAc(1) |
| 5402 | [symbol] | Hex(5)HexNAc(4)Fuc(0)NeuAc(2) |
| 5410 | [symbol] | Hex(5)HexNAc(4)Fuc(1)NeuAc(0) |
| 5411 | [symbol] | Hex(5)HexNAc(4)Fuc(1)NeuAc(1) |
| 5420 | [symbol] | Hex(5)HexNAc(4)Fuc(2)NeuAc(0) |
| 5421 | [symbol] | Hex(5)HexNAc(4)Fuc(2)NeuAc(1) |
| 5500 | [symbol] | Hex(5)HexNAc(5)Fuc(0)NeuAc(0) |
| 5501 | [symbol] | Hex(5)HexNAc(5)Fuc(0)NeuAc(1) |
| 5502 | [symbol] | Hex(5)HexNAc(5)Fuc(0)NeuAc(2) |
| 5510 | [symbol] | Hex(5)HexNAc(5)Fuc(1)NeuAc(0) |
| 5511 | [symbol] | Hex(5)HexNAc(5)Fuc(1)NeuAc(1) |
| 6200 | [symbol] | Hex(6)HexNAc(2)Fuc(0)NeuAc(0) |
| 6301 | [symbol] | Hex(6)HexNAc(3)Fuc(0)NeuAc(1) |
| 6311 | [symbol] | Hex(6)HexNAc(3)Fuc(1)NeuAc(1) |
| 6501 | [symbol] | Hex(6)HexNAc(5)Fuc(0)NeuAc(1) |
| 6502 | [symbol] | Hex(6)HexNAc(5)Fuc(0)NeuAc(2) |
| 6503 | [symbol] | Hex(6)HexNAc(5)Fuc(0)NeuAc(3) |
| 6511 | [symbol] | Hex(6)HexNAc(5)Fuc(1)NeuAc(1) |
| 6520 | [symbol] | Hex(6)HexNAc(5)Fuc(2)NeuAc(0) |
| 6610 | [symbol] | Hex(6)HexNAc(6)Fuc(1)NeuAc(0) |
| 7602 | [symbol] | Hex(7)HexNAc(6)Fuc(0)NeuAc(2) |
| 7603 | [symbol] | Hex(7)HexNAc(6)Fuc(0)NeuAc(3) |
| 10803 (5401 & 5402) (two glycans on the same peptide) | [symbol] | Hex(5)HexNAc(4)Fuc(0)NeuAc(1) and Hex(5)HexNAc(4)Fuc(0)NeuAc(2) |

Legend for Table 63

| | | | | |
|---|---|---|---|---|
| ● | [symbol] | [symbol] | [symbol] | [symbol] |
| Glc | Gal | Man | Fuc | Neu5Ac |
| | ▪ | [symbol] | [symbol] | |
| | GlcNAc | GalNAc | ManNAc | |

[0920] Aspects of the disclosure include kits comprising one or more compositions, each comprising one or more peptide structures of the disclosure that can be used as assay standards, and instructions for use. Kits in accordance with one or more embodiments described herein may include a label indicating the intended use of the contents of the kit. The term “label” as used herein with respect to a kit includes any writing, or recorded material supplied on or with a kit, or that otherwise accompanies a kit.

[0921] The peptide structures and the transitions produced therefrom, as described herein, may be useful for treatment management of melanoma. A transition includes a precursor ion and at least one product ion grouping. As reviewed herein, the peptide structures in Table 55, as well as their corresponding precursor ion and product ion groupings (these ions having defined m/z ratios or m/z ratios that fall within the m/z ranges identified herein), can be used in mass spectrometry-based analyses to predict treatment response, select a treatment for administration, determine whether to alter a treatment plan or dosage, or a combination thereof.

[0922] Aspects of the disclosure include methods for analyzing one or more peptide structures, as described herein. In some embodiments, the methods involve processing a sample from a patient to generate a prepared sample that can be inputted into a mass spectrometry system (e.g., a reaction monitoring mass spectrometry system). In certain embodiments, processing the sample can comprise performing one or more of: a denaturation procedure, a reduction procedure, an alkylation procedure, and a digestion procedure. The denaturation and reduction procedures may be implemented in a manner similar to, for example, denaturation and reduction 202 in FIG. 2A. The alkylation procedure may be implemented in a manner similar to, for example, alkylation procedure 204 in FIG. 2A. The digestion procedure may be implemented in a manner similar to, for example, digestion procedure 206 in FIG. 2A.

[0923] In some embodiments, the methods for analyzing one or more peptide structures involve detecting a set of product ions generated by a reaction monitoring mass spectrometry system in which one or more product ions may correspond to each of the one or more peptide structures that have been inputted into the mass spectrometry system. As described herein, each peptide structure can be converted into a set of product ions having a defined m/z ratio, as provided in Table 60A or an m/z ratio within an identified m/z ratio as provided in Table 60A. In some embodiments, the methods involve generating quantification (e.g., abundance) data for the one or more product ions detected using the reaction monitoring mass spectrometry system.

[0924] In some embodiments, the methods further comprise generating a diagnosis output using the quantification data and a model that has been trained using supervised or unsupervised machine-learning. In certain embodiments, the reaction monitoring mass spectrometry system may include multiple/selected reaction monitoring mass spectrometry (MRM/SRM-MS) to detect the one or more product ions and generate the quantification data.

### IX. Representative Experimental Results

### IX.A. Sample Preparation and Mass Spectrometry Data Production

[0925] FIG. 10 is a table of the sample population used for the studies in accordance with various embodiments. The samples used to generate the experimental results included serum samples from 109 patients with a biopsy-proven diagnosis of NASH (88 biological male, 20 biological female, 1 biological sex unknown; Indivumed AG, Hamburg, Germany and from Bay Biosciences, Brookline, Massachusetts), and 142 healthy subjects with no history of liver disease (control, 66 male, 76 female) which were sourced from Precision for Medicine (Carlsbad, CA). In at least some cases, clinical diagnoses of patients with NASH were based on information provided by the sample supplier.

[0926] Prior to analysis, serum samples were reduced with DTT and alkylated with IAA followed by digestion with trypsin in a water bath at 37° C. for 18 hours. To quench the digestion, formic acid was added to each sample after incubation to a final concentration of 1%.

[0927] Digested serum samples were injected into a triple quadrupole mass spectrometer (MS) using a liquid chromatography system (e.g., a high-performance liquid chromatography (HPLC) system). Separation of the peptide structures (glycosylated and aglycosylated) was performed using a 70-min binary gradient. The triple quadrupole MS was operated in dynamic multiple reaction monitoring (dMRM) mode. Samples were injected in a randomized fashion with regard to underlying phenotype, and reference pooled serum digests were injected interspersed with study samples, at every 10^{th} sample position throughout the run.

[0928] An MRM analysis was performed on the peptide structures, representing a total of 48 high-abundance serum glycoproteins. A transition list consisted of glycopeptide structures as well as aglycosylated peptide structures from each glycoprotein. The python library Scikit-learn (https://scikit-leam.org/stable/) was used for statistical analyses and for building machine learning models.

[0929] Normalized abundance data was generated for the peptide structures using the following formula:

$$Normalized abundance for a given peptide structure = ( relative abundance of a peptide structure in sample / average relative abundance of the same peptide in the flanking reference serum samples$$

Relative abundance was calculated as the ratio of the raw abundance of any given peptide in a sample to the raw abundance of an aglycosylated peptide from the same glycoprotein in the sample.

### IX.B. Analysis of Peptide Structure Data (e.g., Abundance Data) and Confirming their Diagnostic Power

[0930] FIG. 9 illustrates that peptide structures for a single glycoprotein (e.g., A1AT, A2MG, AGP1, AAACT, AGP12, etc.) as well as peptide structures for a combination of such glycoproteins may be useful in diagnosing when a subject has progressed from a non-NASH (e.g., healthy state) to NASH or from early stage NASH to late stage NASH (not shown).

[0931] The normalized abundances of various peptide structures (e.g., those peptide structures identified in Table 1B) were used to train a first regression model (e.g., Model 1) to generate a disease indicator for a subject. The disease indicator was generated as a score (e.g., probability score) in which the range in which the score falls enables diagnosis or classification as non-NASH (e.g., control) to NASH (FIG. 12). The normalized abundances of various peptide structures (e.g., those peptide structures identified in Table 1B) were used to train a first regression model (e.g., Model 2) to generate a disease indicator for a subject. The disease indicator was generated as a score (e.g., probability score) in which the range in which the score falls enables diagnosis or classification as an early stage NASH state or a late stage NASH state (FIG. 11).

### IX.C. Validation

[0932] The upper left panel of FIG. 11 is a plot diagram illustrating validation of the disease indicator's ability to distinguish between early stage NASH state and late stage NASH, in accordance with various embodiments. As depicted, a disease indicator of about 0.5-1 was generally accurate in classifying as an early stage NASH state and a disease indicator of about 0.0-0.5 was generally accurate in classifying as a late stage NASH state. The upper right panel of FIG. 11 is a plot diagram of the receiver-operating-characteristic (ROC) curve for distinguishing between the early stage NASH state and the late stage NASH state for both the training and testing sets in accordance with various embodiments. A 70:30 train:test split of the training data was utilized, in which 70% of the training data was used to train a logistic regression model, which was used to make a prediction on the remaining 30% of the data. As shown in the panel, the area under the ROC curve (AUROC) for the training set was found to be 0.93, while the AUROC for the testing set was found to be 0.83.

[0933] The upper left panel of FIG. 12 is a plot diagram illustrating validation of the disease indicator's ability to distinguish between a control state and NASH, in accordance with various embodiments. As depicted, a disease indicator of about 0.5-1.0 was generally accurate in classifying as a control (e.g., non-NASH individual) and a disease indicator of about 0.0-0.5 was generally accurate in classifying as a NASH state.

[0934] The upper right panel of FIG. 12 is a plot diagram of the receiver-operating-characteristic (ROC) curve for distinguishing between a healthy control state and a NASH state for both the training and testing sets in accordance with various embodiments. Again, a 70:30 train:test split of the training data was utilized, in which 70% of the training data was used to train a logistic regression model, which was used to make a prediction on the remaining 30% of the data. As shown in the panel, the area under the ROC curve (AUROC) for the training set was found to be 0.99, while the AUROC for the testing set was found to be 0.96.

### IX.C.1. Validation using 3 Representative Patients

[0935] Three representative patients were tested using a trained regression model trained to distinguish between NASH and control. Table 9 provides the normalized abundances determined for each patient for various peptide structures. At the bottom of Table 9, the disease indicators computed for these patients based on the normalized abundances are provided. The disease indicator is a probability score that indicates the likelihood that the subject has NASH. For model 1, a predicted probability >0.5 indicates there may be a likelihood that the sample is a control or from an individual without NASH, and a predicted probability ≤0.5 indicates there may be a likelihood that the individual has NASH. In the present example, all three patients were correctly identified.

TABLE 9
Patient Examples

| | Patient 1 | Patient 2 | Patient 3 |
|---|---|---|---|
| | Probabil- | Probabil- | Probabil- |
| Com- | ity | ity | ity |
| pound | Score | Score | Score |
| Name | (Model 1) | (Model 1) | (Model 1) |
| A1AT_ | 1.346131747 | 1.134416126 | 1.289330789 |
| 271_ | | | |
| 5402 | | | |
| A2MG_ | 0.984693144 | 1.334874883 | 1.175643546 |
| 1424_ | | | |
| 5402 | | | |
| A2MG_ | 1.149145341 | 0.955301313 | 1.126117245 |
| 1424_ | | | |
| NONGLY- | | | |
| COSY- | | | |
| LATED | | | |
| AACT_ | 0.581364042 | 0.481911284 | 0.855041665 |
| 271_ | | | |
| 7602 | | | |
| AGP12_ | 1.559377174 | 0.992967622 | 0.770675162 |
| 72_ | | | |
| 7604 | | | |
| APOB_ | 0.980588067 | 1.222024624 | 1.267639338 |
| 3895_ | | | |
| 5401 | | | |
| APOC3_ | 1.114566801 | 0.849938341 | 1.108545626 |
| 74_ | | | |
| 1101 | | | |
| HRG_ | 0.558787554 | 0.96031758 | 0.746959247 |
| 271_ | | | |
| 2202 | | | |
| IGA12_ | 0.830701312 | 1.114278084 | 0.453645283 |
| 144_ | | | |
| 4401 | | | |
| IGG1_ | 0.708349304 | 0.597807186 | 1.183152656 |
| 297_ | | | |
| 5410 | | | |
| IGG2_ | 0.935383107 | 0.827287795 | 1.032551293 |
| 297_ | | | |
| 4411 | | | |
| IGG2_ | 0.772837034 | 0.46381311 | 1.14166881 |
| 297_ | | | |
| 5410 | | | |
| KLKB1_ | 0.780186994 | 1.59389123 | 1.608936811 |
| 494MC_ | | | |
| 5402 | | | |
| QUANT- | 1.223800501 | 1.023398181 | 1.160593734 |
| PEP. | | | |
| ANT3_ | | | |
| FATTFY | | | |
| QHLADSK | | | |
| Model 1 | 0.923148544 | 0.099315721 | 0.320775355 |
| Pre- | | | |
| dicted | | | |
| Proba- | | | |
| bility | | | |
| Score | | | |

[0936] In some embodiments, samples from one or more individuals are subjected to Model 2, in which case a predicted probability >0.5 indicates there may be a likelihood for the presence of early stage NASH and ≤0.5 indicates a likelihood for the presence of late stage NASH.

### X. Exemplary Embodiments for NASH Identification and Fibrosis Stage Prediction

[0937] The present disclosure concerns embodiments for systems, methods, and compositions related to identification of non-alcoholic steatohepatitis (NASH) and/or identification or prediction of a fibrosis stage in an individual with NASH. The embodiments concern classifying biological samples, measuring for one or more certain markers from a biological sample, assaying for one or more certain markers from a biological sample, determining the presence of one or more certain markers from a biological sample, and so forth. The embodiments of the disclosure utilize models that accurately either identify that an individual may have NASH or that identify the fibrosis stage of NASH of the individual based on the presence of one or more markers in sample(s) from the individual. In various embodiments, a model identifies that the individual has NASH and another model identifies the particular fibrotic stage of the NASH of the individual.

[0938] In particular embodiments, the systems, methods, and compositions encompassed in the disclosure are significantly different to distinguish stages of fibrosis in NASH despite the glycoprotein profile being similar among at least some of the NASH stages. The systems, methods, and compositions encompassed herein also are sufficiently specific to utilize markers that distinguish between control and NASH. In various embodiments, the systems, methods, and compositions encompassed herein identify progression from the absence of NASH to early stage NASH to late stage NASH. In various embodiments, there may be fewer marker differences between early stage and late stage NASH compared to more marker differences between control or absence of NASH and NASH. In some embodiments, the markers are accurate regardless of the status of one or more characteristics of the individual: biological sex, sample source, sample collection, smoker status, or age.

[0939] In various embodiments of the disclosure, an individual is in need of identifying whether or not they have NASH or whether or not they have early stage fibrosis of NASH or late stage fibrosis of NASH. The individual may be in need of such identification based on family history of fatty liver disease and/or based on having one or more symptoms of NASH, such as fatigue and/or upper right abdomen pain, although the individual may be asymptomatic in the early stages. The individual may be in need of identifying whether or not they have NASH and, upon confirmation of NASH, they may be in need of identifying the stage of fibrosis of NASH. In some cases, the same sample from the individual is utilized for both tests, although in other cases it is not. The same markers may or may not be utilized for both tests. In some cases, the analysis of the sample of the individual is the sole test utilized for identifying NASH and/or fibrosis stage, whereas in other cases a medical provider may utilize one or more other tests, such as ultrasound, magnetic resonance imaging, transient elastography, ultrasound elastography, and/or magnetic resonance elastography.

[0940] Any individual may be subject to methods of the disclosure, including any person of any biological sex, any gender, any smoker status, any ethnicity, and so forth. In various embodiments, an individual is subject to any method encompassed herein as a part of routine preventative or health check medical practices or because NASH is present or suspected of being present.

[0941] In various embodiments, the sample for analysis for NASH identification and/or fibrosis staging is not a liver biopsy. In particular embodiments, the sample for analysis for NASH identification and/or fibrosis staging is serum from the individual. The present disclosure provides for measuring for one or more circulating glycoproteins, glycopeptides, or non-glycosylated peptides in serum to diagnose or identify the presence of NASH and/or to predict stages of fibrosis in individuals diagnosed with NASH. In various embodiments, the sample is measured for 1, 2, 3, 4, 5, 6, 7, 8, 9, 10, 11, 12, 13, 14, 15, 16, 17, 18, 19, 20, 21, 22, 23, 24, 25, 26, 27, 28, or 29 of the peptides of Table 1A. In various embodiments, the sample is measured for 1, 2, 3, 4, 5, 6, 7, 8, 9, 10, 11, 12, 13, or all of the peptides of Table 1B.

[0942] Embodiments of the disclosure include methods of classifying samples, including serum samples, from an individual suspected of having, known to have, or at risk for having non-alcoholic steatohepatitis (NASH) by measuring from the sample for one or more glycopeptides and/or non-glycosylated peptides encompassed herein. The methods encompass whether or not NASH is identified in the individual. In some cases, the measuring identifies the individual as not having NASH or as having NASH. In various embodiments, in cases wherein the individual has one or more glycopeptides and/or non-glycosylated peptides of Table 1A or 1, or certain levels thereof compared to control or healthy individuals, the individual may be determined to have NASH. In various embodiments, in cases wherein the individual lacks the glycopeptides and/or non-glycosylated peptides of Table 1A or 1B, or has certain levels thereof compared to control or healthy individuals, the individual may be determined not to have NASH. The measuring may identify the individual as having a particular stage of fibrosis of NASH, including at least early stage or late stage. In some cases, one or more samples from the individual are measured for one or more glycopeptides and/or non-glycosylated peptides encompassed herein that identify the individual as having a particular stage of fibrosis of NASH that is early stage or late stage. In specific cases, the measuring comprises successive or concomitant steps of identifying that the individual has NASH and that the individual has a particular stage of fibrosis of NASH.

[0943] In various embodiments, an individual at risk for having NASH is subjected to methods of the disclosure to identify, or not, the presence of NASH. Such methods also measure for one or more glycopeptides and/or non-glycosylated peptides encompassed herein. In various embodiments, in cases wherein the individual has one or more glycopeptides and/or non-glycosylated peptides of Table 1A or 1, the individual may be determined to have NASH. In various embodiments, in cases wherein the individual lacks the glycopeptides and/or non-glycosylated peptides of Table 1A or 1, the individual may be determined not to have NASH. The individual may be of any kind, although in specific cases individual at risk for having NASH has a family history of fatty liver disease; diabetes; obesity; metabolic syndrome; dyslipidemia; hypertension; elevated levels of Aspartate aminotransferase and/or alanine transaminase; a mutation in patatin-like phospholipase domain-containing 3 (PNPLA3); a mutation in transmembrane 6 superfamily member 2 (TM6SF2); a mutation in membrane bound O-acyltransferase domain-containing 7 (MBOAT7); a mutation in glucokinase regulator (GCKR), or a combination thereof.

[0944] Embodiments of the disclosure include methods of predicting a stage of fibrosis in NASH in an individual in need thereof by measuring for one or more glycopeptides or non-glycosylated peptides from Table 1A or 1B in one or more samples, which may comprise serum, from the individual. The individual may be known to have NASH or may be suspected of having NAS The predicted stage may be early stage or late stage fibrosis. In various embodiments, the sample is measured for 1, 2, 3, 4, 5, 6, 7, 8, 9, 10, 11, 12, 13, 14, 15, 16, 17, 18, 19, 20, 21, 22, 23, 24, 25, 26, 27, 28, or 29 of the peptides of Table 1A. In various embodiments, the sample is measured for 1, 2, 3, 4, 5, 6, 7, 8, 9, 10, 11, 12, 13, or all of the peptides of Table 1B.

[0945] In embodiments wherein the measuring identifies the individual as having NASH, the individual may be recommended to take action to treat NASH, slow the progression of NASH, or (particularly in the case of early stage NASH) reverse one or more symptoms of NASH. In particular embodiments, an individual may be recommended to lose weight, exercise more, control glucose level, reduce cholesterol, limit salt intake, limit sugar intake, reduce cholesterol, avoid or reduce alcohol intake, avoid liver-harming medications or dietary supplements, get vaccinated for hepatitis A, get vaccinated for hepatitis B, take vitamin E, take pioglitazone, take liraglutide, monitor for hepatic cell carcinoma (HCC), or a combination thereof. In various embodiments, the individual with NASH is at risk for developing HCC, and the individual may be tested for HCC and/or begin monitoring periodically for the presence of HCC.

### XI. Exemplary Methodologies Relating to Diagnosis Based on Peptide Structure Data Analysis

### XI.A. General Methodology

[0946] FIG. 13 is a flowchart of a process for diagnosing a subject with respect to a breast cancer (BC) disease state in accordance with one or more embodiments. Process 1300 may be implemented using, for example, at least a portion of workflow 100 as described in FIGS. 1, 2A, and 2B and/or analysis system 300 as described in FIG. 3. Process 1300 may be used to generate a final output that includes at least a diagnosis output for the subject.

[0947] Step 1302 includes receiving peptide structure data corresponding to a biological sample obtained from the subject. The peptide structure data may be, for example, one example of an implementation of peptide structure data 310 in FIG. 3. The peptide structure data may include quantification data for each peptide structure of a plurality of peptide structures. The quantification data may include, for example, one or more quantification metrics for each peptide structure of the plurality of peptide structures. A quantification metric for a peptide structure may be, for example, but is not limited to, a relative quantity, an adjusted quantity, a normalized quantity, a relative concentration, an adjusted concentration, or a normalized concentration. In this manner, the quantification data for a given peptide structure provides an indication of the abundance of the peptide structure in the biological sample. In some cases, at least one peptide structure includes a glycopeptide structure having a peptide sequence and a glycan structure linked to the peptide sequence at a linking site of the peptide sequence, as identified in Table 9, with the peptide sequence being one of SEQ ID NOS: 46-62 as defined in Table 9.

[0948] Step 1304 includes analyzing the peptide structure data using a supervised machine learning model to generate a disease indicator that indicates whether the biological sample evidences a BC disease state based on at least 1 peptide structure selected from a group of peptide structures identified in Table 9, Table 10A, or Table 10B (below). In step 504, the group of peptide structures in Table 9, Table 10A, or Table 10B is associated with the BC disease state. The group of peptide structures is listed in Table 9, Table 10A, or Table 10B with respect to relative significance to the disease indicator.

[0949] In one or more embodiments, the at least 1 peptide structure includes at least 1, at least 2, at least 3, at least 4, at least 5, at least 6, at least 7, at least 8, at least 9, at least 10, at least 11, at least 12, at least 13, at least 14, at least 15, at least 16, at least 17, or all 18 of the peptide structures PS-30 through PS-47 in Table 9.

[0950] In one or more embodiments, the at least 1 peptide structure includes at least 1, at least 2, at least 3, at least 4, at least 5, at least 6, or all 7 of the peptide structures PS-33, PS-42, PS-44, PS-30, PS-47, PS-43, or PS-37 in Table 10A.

[0951] In one or more embodiments, the at least 1 peptide structure includes at least 1, at least 2, at least 3, at least 4, at least 5, at least 6, at least 7, or all 8 of the peptide structures PS-42, PS-33, PS-41, PS-43, PS-47, PS-37, PS-30, or PS-45 in Table 10B.

TABLE 9
Peptide Structures associated with Breast Cancer

| | | | | Linking | Linking | | |
|---|---|---|---|---|---|---|---|
| | | | | Site | Site | | |
| | | Prot | Pept | Position | Position | Glycan | |
| | | SEQ | SEQ | within | within | Struc | Mono- |
| PS-ID | | ID | ID | Prot | Pept | GL | isotopic |
| NO. | PS-NAME | NO. | NO. | Seq | Seq | NO. | mass |
| 33 | A2MG_1424_ | 63 | 46 | 247 | 10 | 5402 | 4635.973824 |
| | NONGLYCOSYLATED | | | | | | |
| 44 | THRB_416_5401 | 64 | 47 | 416 | 1 | 5401 | 3133.296654 |
| 30 | A1AT_107_6502 | 65 | 48 | 107 | 14 | 6502 | 6260.721064 |
| 42 | PLASMAFGB_ | 66 | 49 | N/A | N/A | N/A | 1949.995878 |
| | EEAPSLRPAPPPISGGGYR | | | | | | |
| 43 | QUANTPEP-APOM_ | 67 | 50 | N/A | N/A | N/A | 816.485756 |
| | AFLLTPR | | | | | | |
| 37 | C1S_174_5402 | 68 | 51 | 174 | 5 | 5402 | 5730.401612 |
| 47 | VTNC_242_5412 | 69 | 52 | 242 | 1 | 5412 | 5122.145318 |
| 45 | THRB_416MC_5401 | 64 | 53 | 416 | 17 | 5401 | 5084.278074 |
| 41 | IGJ_71MC_ | 70 | 54 | N/A | N/A | N/A | 2147.169814 |
| | NONGLYCOSYLATED | | | | | | |
| 34 | AACT_127_5401 | 71 | 55 | 127 | 3 | 5401 | 4125.727334 |
| 32 | A2MG_1424_5402_Z5 | 63 | 56 | 1424 | 3 | 5402 | 4366.945898 |
| 38 | CFAH_1095_5401 | 72 | 57 | 1095 | 17 | 5401 | 4930.910914 |
| 31 | A2MG_1424_5402_Z3 | 63 | 56 | 1424 | 3 | 5402 | 4366.945898 |
| 39 | HRG_271_2202 | 73 | 58 | 271 | 1 | 2202 | 2838.255284 |
| 40 | IGA2_205_5410 | 74 | 59 | 205 | 6 | 5410 | 2726.188952 |
| 35 | ANT_128_5402 | 75 | 60 | 128 | 5 | 5402 | 4070.673904 |
| 46 | TRFE_432_ | 76 | 61 | N/A | N/A | N/A | 1475.744216 |
| | NONGLYCOSYLATED | | | | | | |
| 36 | APOM_135_5402 | 67 | 62 | 135 | 15 | 5402 | 4735.914404 |

TABLE 10A
Peptide Structures for Model 1: Healthy vs. Breast Cancer

| | | Protein | Peptide |
|---|---|---|---|
| PS-ID | | SEQ ID | SEQ ID |
| NO. | PS-NAME | NO. | NO. |
| 33 | A2MG_1424_NONGLYCOSYLATED | 63 | 46 |
| 42 | PLASMAFGB_EEAPSLRPAPPPISGGGYR | 66 | 49 |
| 44 | THRB_416_5401 | 64 | 47 |
| 30 | A1AT_107_6502 | 65 | 48 |
| 47 | VTNC_242_5412 | 69 | 52 |
| 43 | QUANTPEP-APOM_AFLLTPR | 67 | 50 |
| 37 | C1S_174_5402 | 68 | 51 |

TABLE 10B
Peptide Structures for Model 2: Healthy vs. Early Stage Breast
Cancer

| | | Protein | Peptide |
|---|---|---|---|
| PS-ID | | SEQ ID | SEQ ID |
| NO. | PS-NAME | NO. | NO. |
| 42 | PLASMAFGB_EEAPSLRPAPPPISGGGYR | 66 | 49 |
| 33 | A2MG_1424_NONGLYCOSYLATED | 63 | 46 |
| 41 | IGJ_71MC_NONGLYCOSYLATED | 70 | 54 |
| 43 | QUANTPEP-APOM_AFLLTPR | 67 | 50 |
| 47 | VTNC_242_5412 | 69 | 52 |
| 37 | C1S_174_5402 | 68 | 51 |
| 30 | A1AT_107_6502 | 65 | 48 |
| 45 | THRB_416MC_5401 | 64 | 53 |

[0952] In one or more embodiments, step 1304 may be implemented using a binary classification model (e.g., a regression model). In some examples, the regression model may be, for example, penalized multivariable regression model. In various embodiments, the disease indicator may be computed using a weight coefficient associated with each peptide structure of the at least 1 peptide structure, the weight coefficient of a corresponding peptide structure of the at least 1 peptide structure may indicate the relative significance of the corresponding peptide structure to the disease indicator.

[0953] In some embodiments, step 1304 may include computing a peptide structure profile for the biological sample that identifies a weighted value for each peptide structure of the at least 1 peptide structure. The weighted value for a peptide structure of the at least 1 peptide structure may be a product of a quantification metric for the peptide structure identified from the peptide structure data and a weight coefficient for the peptide structure. The disease indicator may be computed using the peptide structure profile. For example, the disease indicator may be a logit equal to the sum of the weighted values for the peptide structures plus an intercept value. The intercept value may be determined during the training of the model.

[0954] In various embodiments, the disease indicator comprises a probability that the biological sample is positive for the BC disease state and the supervised machine learning model is configured to generate an output that identifies the biological sample as either evidencing (“positive for”) the BC disease state when the disease indicator is greater than a selected threshold or not evidencing (“negative for”) the BC disease state when the disease indicator is not greater than the selected threshold. The selected threshold may be, for example, 0.30, 0.35, 0.40, 0.45, 0.50, 0.55, or some other threshold. In one or more embodiments, the selected threshold is 0.5.

[0955] Step 1306 includes generating a final output based on the disease indicator. The final output may include a diagnosis output, such as, for example, diagnosis output 324 in FIG. 3. The diagnosis output may include the disease indicator, or a diagnosis made based on the disease indicator. The diagnosis may be, for example, “positive” for the BC disease state if the biological sample evidences the BC disease state based on the disease indicator. The diagnosis may be, for example, “negative” if the biological sample does not evidence the BC disease state based on the disease indicator. A negative diagnosis may mean that the biological sample has a non-breast cancer (BC) state (e.g., healthy, control, etc.). The negative diagnosis for the BC disease state can include at least one of a healthy state or a control state.

[0956] Generating the diagnosis output in step 1306 may include determining that the score falls above a selected threshold and generating a positive diagnosis for the BC disease state. Alternatively, step 1306 can include determining that the score falls below a selected threshold and generating a negative diagnosis for the BC disease state. In some scoring systems, the score can include a probability score and the selected threshold can be 0.5. In other scoring systems, the selected threshold can fall within a range between 0.4 and 0.6.

[0957] In one or more embodiments, the final output in step 1306 may include a treatment output if the diagnosis output indicates a positive diagnosis for the BC disease state. The treatment output may include, for example, at least one of an identification of a treatment for the subject, a treatment plan for administering the treatment, or both. Treatment for breast cancer may include, for example, but is not limited to, at least one of radiation therapy, chemoradiotherapy, surgery, a targeted drug therapy, or some other form of treatment. The treatment plan may include, for example, but is not limited to, a timeline or schedule for administering the treatment, dosing information, other treatment-related information, or a combination thereof.

### XI. B. Training the Model to Diagnose with respect to the BC Disease State

[0958] FIG. 14 is a flowchart of a process for training a model to diagnose a subject with respect to a breast cancer (BC) disease state in accordance with one or more embodiments. Process 1400 may be implemented using, for example, at least a portion of workflow 100 as described in FIGS. 1, 2A, and 2B and/or analysis system 300 as described in FIG. 3. In some embodiments, process 1400 may be one example of an implementation for training the model used in the process 1300 in FIG. 13.

[0959] Step 1402 includes receiving quantification data for a panel of peptide structures for a plurality of subjects. The plurality of subjects includes a first portion diagnosed with a negative diagnosis of a BC disease state and a second portion diagnosed with a positive diagnosis of the BC disease state. The quantification data comprises a plurality of peptide structure profiles for the plurality of subjects.

[0960] Step 1404 includes training a machine learning model using the quantification data to diagnose a biological sample with respect to the BC disease state using a group of peptide structures associated with the BC disease state (e.g., the group of peptide structures is identified in Table 9). The group of peptide structures is listed in Table 9 with respect to relative significance to diagnosing the biological sample. Step 1404 can include training the machine learning using a portion of the quantification data corresponding to a training group of peptide structures included in the plurality of peptide structures.

[0961] Training data can be used for training the supervised machine learning model. The training data can include a plurality of peptide structure profiles for a plurality of subjects and a plurality of subject diagnoses for the plurality of subjects. The plurality of subject diagnoses can include a positive diagnosis for any subject of the plurality of subjects determined to have the BC disease state and a negative diagnosis for any subject of the plurality of subjects determined not to have the BC disease state.

[0962] The machine learning model can include a binary classification model. Some binary classification models can include logistical regression models. Some logistical regression models can include LASSO regression models.

[0963] An alternative or additional step in process 1400 can include performing a differential expression analysis using initial training data to compare a first portion of the plurality of subjects diagnosed with the positive diagnosis for the BC disease state versus a second portion of the plurality of subjects diagnosed with the negative diagnosis for the BC disease state.

[0964] An alternative or additional step in process 1400 can include identifying a training group of peptide structures based on the differential expression analysis for use as prognostic markers for the BC disease state.

[0965] An alternative or additional step in process 1400 can include forming the training data based on the training group of peptide structures identified.

[0966] An alternative or additional step in process 1400 can include identifying a training group of peptide structures based on the differential expression analysis, wherein the training group of peptide structures is a subset of the plurality of peptide structures relevant to diagnosing the BC disease state. The subset may be identified based on at least one of fold-changes, false discovery rates, or p-values computed as part of the differential expression analysis.

[0967] An alternative or additional step in process 1400 can include training a machine learning model, using the quantification data for the training group of peptide structures, to diagnose a subject of a biological sample with respect to the BC disease state using a group of peptide structures associated with the BC disease state. The group of peptide structures may be a subset of the training group of peptide structures and is identified in Table 9. The group of peptide structures is listed in Table 9 with respect to relative significance to making the diagnosis.

[0968] In various embodiments, the machine learning model is a supervised machine learning model that is trained to determine weight coefficients for a panel of peptide structures such that a first portion of the weight coefficients for a first portion of the panel of peptide structures are non-zero and a second portion of the weight coefficients for a second portion of the panel of peptide structures are zero (or, alternatively, substantially close to zero so as to not be statistically significant).

[0969] For example, the machine learning model may be a LASSO regression model that identifies the peptide structures of Table 10A or 10B below, which include at least a portion of the group of peptide structures identified in Table 9. The markers used for training of the LASSO regression model may, in one or more embodiments, additionally include one or more other peptide structure markers.

[0970] In one or more embodiments, a subset of the markers identified in Table 10A or 10B may be used for training of the LASSO regression model. Alternatively, the markers identified in Table 10A or 10B may be a subset for training of the LASSO regression model. For example, the LASSO regression model may be trained using at least one other marker in addition to those identified in Table 10A or 10B.

### XI.C. Monitoring a Subject for a Breast Cancer Disease State

[0971] FIG. 15 is a flowchart of a process for monitoring a subject for a breast cancer (BC) disease state in accordance with one or more embodiments. Process 1500 may be implemented using, for example, at least a portion of workflow 100 as described in FIGS. 1, 2A, and 2B and/or analysis system 300 as described in FIG. 3.

[0972] Step 1502 includes receiving first peptide structure data for a first biological sample obtained from a subject at a first timepoint.

[0973] Step 1504 includes analyzing the first peptide structure data using a supervised machine learning model to generate a first disease indicator based on at least 1 peptide structure selected from a group of peptide structures identified in Table 9. The group of peptide structures in Table 9 includes a group of peptide structures associated with a BC disease state in accordance with various embodiments. The supervised machine can be a binary classification model. In some embodiments, the binary classification model can be a logistical regression model.

[0974] Step 1506 includes receiving second peptide structure data of a second biological sample obtained from the subject at a second timepoint.

[0975] Step 1508 includes analyzing the second peptide structure data using the supervised machine learning model to generate a second disease indicator based on the at least 1 peptide structure selected from the group of peptide structures identified in Table 9.

[0976] Step 1510 includes generating a diagnosis output based on the first disease indicator and the second disease indicator. Generating the diagnostic output can include comparing the second disease indicator to the first disease indicator.

[0977] In some embodiments, the first disease indicator indicates that the first biological sample evidences the negative diagnosis for the BC disease state and the second biological sample evidences the positive diagnosis for the BC disease. In other embodiments, the diagnosis output identifies whether a non-BC disease state has progressed to the BC disease state, wherein the non-BC disease state includes either a healthy state, a control state, or a benign pancreatitis state.

### XI.D. Peptide Structure and Product Ion Compositions, Kits and Reagents

[0978] Aspects of the disclosure include compositions comprising one or more of the peptide structures listed in Table 9. In some embodiments, a composition comprises a plurality of the peptide structures listed in Table 9. In some embodiments, a composition comprises 1, 2, 3, 4, 5, 6, 7, 8, 9, 10, 11, 12, 13, 14, 15, 16, 17, 18, 19, 20, 21, 22, 23, 24, 25, 26, 27, 28, 29, 30, 31, 32, 33, 34, 35, 36, 37, 38, 39, 40, 41, 42, 43, 44, 45, 46, 47, 48, 39, 50, 51, 52, 53, 54, or all of the peptide structures listed in Table 9. In some embodiments, a composition comprises a peptide structure having an amino acid sequence with at least 80% sequence identity, such as, for example, at least 81%, 82%, 83%, 84%, 85%, 86%, 87%, 88%, 89%, 90%, 91%, 92%, 93%, 94%, 95%, 96%, 97%, 98%, 99%, or 100% sequence identity to any one of SEQ ID NOs: 46-62, listed in Table 9.

[0979] Aspects of the disclosure include compositions comprising one or more precursor ions having a defined charge and/or defined mass-to-charge (m/z) ratio, as listed in Table 11. Aspects of the disclosure include compositions comprising one or more product ions having a defined mass-to-charge (m/z) ratio, which product ions are produced by converting a peptide structure described herein (e.g., a peptide structure listed in Table 9) into a gas phase ion in a mass spectrometry system. Conversion of the peptide structure into a gas phase ion can take place using any of a variety of techniques, including, but not limited to, matrix assisted laser desorption ionization (MALDI); electron ionization (EI); electrospray ionization (ESI); atmospheric pressure chemical ionization (APCI); and/or atmospheric pressure photo ionization (APPI).

[0980] Aspects of the disclosure include compositions comprising one or more product ions produced from one or more of the peptide structures described herein (e.g., a peptide structure listed in Table 9). In some embodiments, a composition comprises a set of the product ions listed in Table 11, having an m/z ratio selected from the list provided for each peptide structure in Table 9 or Table 11.

[0981] In some embodiments, a composition comprises at least one of peptide structures PS-30 through PS-47 identified in Table 9. In one or more embodiments, a composition comprises at least 1, at least 2, at least 3, at least 4, at least 5, at least 6, at least 7, at least 8, at least 9, at least 10, at least 11, at least 12, at least 13, at least 14, at least 15, at least 16, at least 17, or all 18 of the peptide structures PS-30 through PS-47 in Table 9.

[0982] In one or more embodiments, a composition comprises at least 1, at least 2, at least 3, at least 4, at least 5, at least 6, or all 7 of the peptide structures PS-33, PS-42, PS-44, PS-30, PS-47, PS-43, or PS-37 in Table 10A.

[0983] In one or more embodiments, a composition comprises at least 1, at least 2, at least 3, at least 4, at least 5, at least 6, at least 7, or all 8 of the peptide structures PS-42, PS-33, PS-41, PS-43, PS-47, PS-37, PS-30, or PS-45 in Table 10B.

[0984] In some embodiments, a composition comprises a peptide structure or a product ion. The peptide structure or product ion comprises an amino acid sequence having at least 90% sequence identity to any one of SEQ ID NOS: 46-62, as identified in Table 12, corresponding to peptide structures PS-30 through PS-47 in Table 9.

[0985] In some embodiments, a composition comprises a peptide structure or a product ion. The peptide structure or product ion comprises an amino acid sequence having at least 90% sequence identity to any one of SEQ ID NOS: 46-62 as identified in Table 12, corresponding to peptide structures PS-30 through PS-47 in Table 9.

[0986] In some embodiments, the product ion is selected as one from a group consisting of product ions identified in Table 11, including product ions falling within an identified m/z range of the m/z ratio identified in Table 11 and characterized as having a precursor ion having an m/z ratio within an identified m/z range of the m/z ratio identified in Table 11. A first range for the product ion m/z ratio may be ±0.5. A second range for the product ion m/z ratio may be ±0.8. A third range for the production m/z ratio may be ±1.0. A first range for the precursor ion m/z ratio may be 1.0; a second range for the precursor ion m/z ratio may be (±1.5). Thus, a composition may include a product ion having an m/z ratio that falls within at least one of the first range (±0.5), the second range (±0.8), or the third range (±1.0) of the product ion m/z ratio identified in Table 11, and characterized as having a precursor ion having an m/z ratio that falls within at least one of first range (±0.5), a second range (±1.0), or a third range (±1.0 of the precursor ion m/z ratio identified in Table 11.

TABLE 11
Mass Spectrometry-Related Characteristics for the
Peptide Structures associated with Breast Cancer

| PS- | Mono- | | | | 2nd | | |
|---|---|---|---|---|---|---|---|
| ID | isotopic | Precursor | Precursor. | Product | Prod | RT | Collision. |
| NO. | mass | m/z | charge | m/z | m/z | (min) | Energy |
| 33 | 4635.973824 | 1160.5 | 4 | 366.1 | N/A | 40.665 | 20 |
| 44 | 3133.296654 | 1046.1 | 3 | 366.1 | N/A | 22.675 | 25 |
| 30 | 6260.721064 | 1253.6 | 5 | 366.1 | N/A | 42.8 | 30 |
| 42 | 1949.995878 | 651.01 | 3 | 811.44 | N/A | 21.1 | 166 |
| 43 | 816.485756 | 409.2 | 2 | 599.4 | N/A | 23.2 | 10 |
| 37 | 5730.401612 | 1147.8 | 5 | 366.1 | 366.1 | 25 | 41 |
| 47 | 5122.145318 | 1282 | 4 | 366.1 | 1488.2 | 37.4 | 38 |
| 45 | 5084.278074 | 1272.6 | 4 | 366.1 | N/A | 39.9 | 25 |
| 41 | 2147.169814 | 717.2 | 3 | 912 | N/A | 26.8 | 20 |
| 34 | 4125.727334 | 1032.9 | 4 | 366.1 | N/A | 33 | 20 |
| 32 | 4366.945898 | 874.4 | 5 | 366.1 | N/A | 44 | 15 |
| 38 | 4930.910914 | 1234.2 | 4 | 366.1 | N/A | 36.2 | 20 |
| 31 | 4366.945898 | 1457.3 | 3 | 366.1 | N/A | 44 | 30 |
| 39 | 2838.255284 | 710.8 | 4 | 274.1 | N/A | 6.6 | 15 |
| 40 | 2726.188952 | 909.8 | 3 | 366.1 | N/A | 12.2 | 22 |
| 35 | 4070.673904 | 1019.2 | 4 | 366.1 | N/A | 40.8 | 20 |
| 46 | 1475.744216 | 739 | 2 | 1047.55 | N/A | 28.3 | 20 |
| 36 | 4735.914404 | 1185.5 | 4 | 366.1 | N/A | 29.8 | 25 |

Table 12A defines the peptide sequences for SEQ TD NOS: 46-62 from Table 9. Table 12 further identifies a corresponding protein SEQ ID NO. for each peptide sequence.

TABLE 12A
Peptide SEQ ID NOS

| | | Corresponding |
|---|---|---|
| Peptide | | Protein |
| SEQ ID NO. | Peptide.sequence | SEQ ID NO. |
| 46 | IITILEEEMNVSVCGLYTYGK | 63 |
| 47 | NFTENDLLVR | 64 |
| 48 | ADTHDEILEGLNFNLTEIPEAQIHEGFQELLR | 65 |
| 49 | EEAPSLRPAPPPISGGGYR | 66 |
| 50 | AFLLTPR | 67 |
| 51 | NCGVNCSGDVFTALIGEIASPNYPKPYPENSR | 68 |
| 52 | NISDGFDGIPDNVDAALALPAHSYSGR | 69 |
| 53 | WVLTAAHCLLYPPWDKNFTENDLLVR | 64 |
| 54 | IIVPLNNRENISDPTSPLR | 70 |
| 55 | TLNQSSDELQLSMGNAMFVK | 71 |
| 56 | VSNQTLSLFFTVLQDVPVR | 63 |
| 57 | SPYEMFGDEEVMCLNGNWTEPPQCK | 72 |
| 58 | SSTTKPPFKPHGSR | 73 |
| 59 | TPLTANITK | 74 |
| 60 | LGACNDTLQQLMEVFK | 75 |
| 61 | CGLVPVLAENYNK | 76 |
| 62 | TELFSSSCPGGIMLNETGQGYQR | 67 |

Table 12B provides an indication of particular markers and includes the starting position of the peptide sequence within the protein sequence and the end position of the peptide sequence within the protein sequence.

TABLE 12B
Markers and Protein Positions

| PS-ID | | | Start | End |
|---|---|---|---|---|
| NO | PS-NAME | Peptide.sequence | position | position |
| 33 | A2MG_1424_ | IITILEEEMNVSVCGLYTYGK | 238 | 258 |
| | NONGLYCOSYLATED | | | |
| 44 | THRB_416_5401 | NFTENDLLVR | 416 | 425 |
| 30 | A1AT_107_6502 | ADTHDEILEGLNFNLTEIPEAQI | 94 | 125 |
| | | HEGFQELLR | | |
| 42 | PLASMAFGB_ | EEAPSLRPAPPPISGGGYR | 54 | 72 |
| | EEAPSLRPAPPPISGGGYR | | | |
| 43 | QUANTPEP- | AFLLTPR | 172 | 178 |
| | APOM_AFLLTPR | | | |
| 37 | C1S_174_5402 | NCGVNCSGDVFTALIGEIASPN | 170 | 201 |
| | | YPKPYPENSR | | |
| 47 | VTNC_242_5412 | NISDGFDGIPDNVDAALALPAH | 242 | 268 |
| | | SYSGR | | |
| 45 | THRB_416MC_5401 | WVLTAAHCLLYPPWDKNFTEN | 400 | 425 |
| | | DLLVR | | |
| 41 | IGJ_71MC_ | IIVPLNNRENISDPTSPLR | 62 | 80 |
| | NONGLYCOSYLATED | | | |
| 34 | AACT_127_5401 | TLNQSSDELQLSMGNAMFVK | 125 | 144 |
| 32 | A2MG_1424_5402_Z5 | VSNQTLSLFFTVLQDVPVR | 1422 | 1440 |
| 38 | CFAH_1095_5401 | SPYEMFGDEEVMCLNGNWTEP | 1079 | 1103 |
| | | PQCK | | |
| 31 | A2MG_1424_5402_Z3 | VSNQTLSLFFTVLQDVPVR | 1422 | 1440 |
| 39 | HRG_271_2202 | SSTTKPPFKPHGSR | 271 | 284 |
| 40 | IGA2_205_5410 | TPLTANITK | 200 | 208 |
| 35 | ANT_128_5402 | LGACNDTLQQLMEVFK | 124 | 139 |
| 46 | TRFE_432_ | CGLVPVLAENYNK | 421 | 433 |
| | NONGLYCOSYLATED | | | |
| 36 | APOM_135_5402 | TELFSSSCPGGIMLNETGQGYQ | 121 | 143 |
| | | R | | |

Table 13 identifies the proteins of SEQ TD NOS: 63-76 from Table 9. Table 13 identifies a corresponding protein abbreviation and protein name for each of protein SEQ TD NOS: 63-76. Further, Table 13 identifies a corresponding Uniprot TD for each of protein SEQ TD NOS: 63-76.

TABLE 13
Protein SEQ ID NOS

| Protein | | | Protein |
|---|---|---|---|
| Abbre- | | Uniprot | SEQ ID |
| viation | Protein Name | ID | NO. |
| A2MG | Alpha-2-macroglobulin | P01023 | 63 |
| THRB | Prothrombin | P00734 | 64 |
| A1AT | Alpha-1-antitrypsin | P01009 | 65 |
| PLASMAFGB | Fibrinogen beta chain | P02675 | 66 |
| APOM | Apolipoprotein M | O95445 | 67 |
| C1S | Complement C1s subcomponent | P09871 | 68 |
| VTNC | Vitronectin | P04004 | 69 |
| IGJ | Immunoglobulin J chain | P01591 | 70 |
| AACT | Alpha-1-antichymotrypsin | P01011 | 71 |
| CFAH1 | ComplementFactorH | P08603 | 72 |
| HRG | Histidine-rich Glycoprotein | P04196 | 73 |
| IGA2 | Immunoglobulin heavy constant | P01877 | 74 |
| | alpha 2 | | |
| ANT | Antithrombin-III | P01008 | 75 |
| TRFE | Serotransferrin | P02787 | 76 |

Table 14 identifies and defines the glycan structures included in Table 9, all of which are N-glycans. Table 14 identifies a coded representation of the composition for each glycan structure included in Table 9. As used herein, the 4-digit GL NO. is a designation that represents the number of hexoses, the number of HexNAcs, the number of Fucoses, and the number of Neuraminic Acids.

TABLE 14
Glycan Structure GL NOS: Composition

| Composition | Structure | Glycan composition | Glycan Mass |
|---|---|---|---|
| 5401 | [symbol] | Hex(5)HexNAc(4)Fuc(0)NeuAc(1) | 1931.687482 |
| 6502 | [symbol] | Hex(6)HexNAc(5)Fuc(0)NeuAc(2) | 2587.91508 |
| 5402 | [symbol] | Hex(5)HexNAc(4)Fuc(0)NeuAc(2) | 2222.782892 |
| 5412 | [symbol] | Hex(5)HexNAc(4)Fuc(1)NeuAc(2) | 2368.840798 |

Legend for Table 14:

| | | | | |
|---|---|---|---|---|
| ● | [symbol] | [symbol] | [symbol] | [symbol] |
| Glc | Gal | Man | Fuc | Neu5Ac |
| ▪ | [symbol] | [symbol] | [symbol] | [symbol] |
| GlcNAc | GalNAc | ManNAc | Xyl | Neu5Gc |
| [symbol] | [symbol] | [symbol] | | [symbol] |
| GlcN | GalN | ManN | | KdN |
| [symbol] | [symbol] | [symbol] | [symbol] | |
| GlcA | GalA | ManA | IdoA | |

[0987] Aspects of the disclosure include kits comprising one or more compositions, each comprising one or more peptide structures of the disclosure that can be used as assay standards, and instructions for use. Kits in accordance with one or more embodiments described herein may include a label indicating the intended use of the contents of the kit. The term “label” as used herein with respect to a kit includes any writing, or recorded material supplied on or with a kit, or that otherwise accompanies a kit.

[0988] The peptide structures and the transitions produced therefrom, as described herein, may be useful for diagnosing and treating a BC disease state. A transition includes a precursor ion and at least one product ion grouping. As reviewed herein, the peptide structures in Table 9, as well as their corresponding precursor ion and product ion groupings (these ions having defined m/z ratios or m/z ratios that fall within the m/z ranges identified herein), can be used in mass spectrometry-based analyses to diagnose and facilitate treatment of diseases, such as, for example, BC.

[0989] Aspects of the disclosure include methods for analyzing one or more peptide structures, as described herein. In some embodiments, the methods involve processing a sample from a patient to generate a prepared sample that can be inputted into a mass spectrometry system (e.g., a reaction monitoring mass spectrometry system). In certain embodiments, processing the sample can comprise performing one or more of: a denaturation procedure, a reduction procedure, an alkylation procedure, and a digestion procedure. The denaturation and reduction procedures may be implemented in a manner similar to, for example, denaturation and reduction 202 in FIG. 2. The alkylation procedure may be implemented in a manner similar to, for example, alkylation procedure 204 in FIG. 2. The digestion procedure may be implemented in a manner similar to, for example, digestion procedure 206 in FIG. 2.

[0990] In some embodiments, the methods for analyzing one or more peptide structures involve detecting a set of product ions generated by a reaction monitoring mass spectrometry system in which one or more product ions may correspond to each of the one or more peptide structures that have been inputted into the mass spectrometry system. As described herein, each peptide structure can be converted into a set of product ions having a defined m/z ratio, as provided in Table 11 or an m/z ratio within an identified m/z ratio as provided in Table 11. In some embodiments, the methods involve generating quantification (e.g., abundance) data for the one or more product ions detected using the reaction monitoring mass spectrometry system.

[0991] In some embodiments, the methods further comprise generating a diagnosis output using the quantification data and a model that has been trained using supervised or unsupervised machine learning. In certain embodiments, the reaction monitoring mass spectrometry system may include multiple/selected reaction monitoring mass spectrometry (MRM/SRM-MS) to detect the one or more product ions and generate the quantification data.

### XI.E. Representative Experimental Results

### Subject Sample Models & Corresponding Training of Said Models

[0992] To assess the association of individual peptide structures (biomarkers) with breast cancer, two differential expression analyses (DEAs) were run on three different subject cohorts, adjusting for age and sex. For Model 1, differential expression was performed to compare healthy controls vs all stages of breast cancer after adjusting for age. For Model 2, differential expression was performed (adjusting for age) to compare healthy controls with early stage breast cancer (stage 1 and stage 2). The markers to be used as input for the regularized logistic regression were selected based on the false discovery rate(FDR) cut off of 0.05.

[0993] The regularized logistic regression method LASSO was utilized for breast cancer disease classification and to identify key markers. LASSO is a type of logistic regression that uses L1 regularization, which adds a penalty equal to the absolute value of the magnitude of coefficients. This type of regularization can result in sparse models with few coefficients; some coefficients can become zero and eliminated from the model which helps us retain only the key coefficients useful for prediction. Here, 70% of the total dataset was used to train the model and tune hyperparameters. In alternative embodiments, other classification algorithms such as random forest, elastic net regression, generalized additive models, etc., can be used for classifying BC.

[0994] During training, a model validation technique called 5-fold cross validation was also performed that assists in assessing how the model will generalize to an independent dataset. The best performing model was ultimately determined based on highest accuracy score on the fewest markers that did not achieve substantial overfitting. This model is then run through an independent test set that consisted of 30% of the total set to confirm biomarker relevance and appropriate model performance.

[0995] For all of the analyses, concentration normalization was used. The formula for concentration normalization is provided below:

$$Peptide concentration = [ peptide abundance / corresponding ISTD abundance ] * spike - in concentration * dilution factor$$

$$GP concentration = [ GP abundance / glycopeptide ISTD abundance ] * spike - in concentration * dilution factor$$

After raw abundance is obtained, the raw abundance is adjusted by multiplying it by the ratio of the mean of Sigma serum samples in the patient run and the mean of the Sigma serum samples in a separate reference set. This result is considered the adjusted raw abundance. From then, the concentration normalization as described above is utilized to prepare the data for analysis.

[0996] The model will output a probability score per patient based on the glycoproteomic signatures identified. Because there are two models, each of them utilizes slightly different glycoproteomic profiles to make the diagnosis. For Model 1 (healthy vs all stages of breast cancer), in various embodiments the probability score may be used to label samples as “likely to develop breast cancer” vs “not likely to develop breast cancer” agnostic of stage. For Model 2 (healthy vs early stage breast cancer (stage 1 and stage 2)), in various embodiments the probability score may determine between healthy state vs early stage breast cancer in women.

[0997] In various embodiments, a novel platform was applied for characterizing blood glycoproteomic biomarkers, combining liquid-chromatography/mass spectrometry (LC-MS) with artificial intelligence/neural networks (AI-NN) to analyze serum samples from 279 breast cancer patients at various stages (median age 56 years; samples acquired from Bay Biosciences and iSpecimen) and to analyze 102 healthy control samples (median age 52 years; samples acquired from Precision for Medicine). A panel of 596 serum glycosylated and non-glycosylated peptides, representing 71 serum proteins, were analyzed. Age-adjusted differential expression analysis for 596 normalized biomarkers were performed to evaluate statistically significant differential abundances using an FDR-adjusted q-value of 0.05 as a cutoff. Using the top 243 differentially expressed markers as input, a LASSO penalized logistic regression model with 5 fold repeated cross validation was applied to identify the top biomarkers contributing to the separation between healthy controls and breast cancer patients.

[0998] FIG. 16 is an example plot of a receiver operating characteristic (ROC) curve for Model 1 for the training set and testing set in accordance with one or more embodiments. The plot illustrates specificity versus sensitivity. Thus, out of 596 markers, 243 markers were identified that were differentially expressed (FDR≤0.05) between breast cancer samples and healthy controls. Out of those, 8 markers were obtained as the top predictors of classifying breast cancer patients and healthy controls from the LASSO classification algorithm that yielded an accuracy of 94% (93.8% sensitivity, 94.4% specificity) and the area under the curve (AUC) for the training set was 0.982. This classifier was validated on an independent test set with 30% of the subjects which gave an accuracy of 93% (95.2% sensitivity, 93.3% specificity) and AUC of 0.981.

TABLE 15A
First Differential Expression Analysis (DEA)

| | | | | Control | Control | Control |
|---|---|---|---|---|---|---|
| | | | | vs early | vs early | vs early |
| PS-ID | Control/BC | Control/BC | Control/BC | stage BC | stage BC | stage BC |
| NO. | (fold change) | (FDR) | (p-value) | (fold change) | (p-value) | (FDR) |
| 33 | 0.56 | 7.11E−46 | 1.41E−43 | 0.567 | 5.13E−40 | 1.02E−37 |
| 44 | 0.642 | 9.20E−16 | 7.83E−14 | 0.647 | 7.16E−13 | 4.74E−11 |
| 30 | 1.392 | 1.43E−12 | 7.08E−11 | 1.427 | 1.08E−12 | 5.87E−11 |
| 42 | 1.847 | 4.03E−10 | 1.00E−08 | 1.648 | 1.82E−06 | 1.81E−05 |
| 43 | 0.802 | 2.14E−13 | 1.42E−11 | 0.779 | 3.88E−14 | 3.31E−12 |
| 37 | 0.767 | 5.66E−13 | 3.07E−11 | 0.773 | 2.45E−11 | 7.70E−10 |
| 47 | 1.388 | 5.67E−11 | 1.88E−09 | 1.366 | 1.77E−08 | 3.01E−07 |
| 45 | 0.742 | 2.86E−12 | 1.22E−10 | 0.723 | 1.82E−12 | 9.05E−11 |
| 41 | 0.925 | 8.50E−12 | 3.38E−10 | 0.917 | 1.43E−11 | 5.11E−10 |
| 34 | 0.776 | 2.70E−12 | 1.22E−10 | 0.761 | 8.05E−13 | 4.80E−11 |
| 32 | 0.673 | 4.86E−11 | 1.81E−09 | 0.696 | 5.40E−09 | 1.04E−07 |
| 38 | 0.813 | 5.50E−11 | 1.88E−09 | 0.809 | 4.70E−10 | 1.08E−08 |
| 31 | 0.682 | 2.03E−10 | 6.05E−09 | 0.706 | 2.54E−08 | 4.09E−07 |
| 39 | 0.829 | 2.76E−10 | 7.48E−09 | 0.804 | 1.10E−11 | 4.39E−10 |
| 40 | 1.368 | 3.99E−10 | 1.00E−08 | 1.409 | 1.40E−09 | 2.88E−08 |
| 35 | 0.815 | 4.55E−10 | 1.08E−08 | 0.787 | 1.46E−11 | 5.11E−10 |
| 46 | 0.742 | 3.64E−09 | 7.23E−08 | 0.736 | 1.65E−07 | 2.14E−06 |
| 36 | 0.865 | 8.95E−09 | 1.67E−07 | 0.843 | 5.47E−10 | 1.21E−08 |

### A. Subject Sample Models

[0999] To assess the association of individual peptide structures (biomarkers) with pancreatic cancer, three differential expression analyses (DEAs) were run on three different subject cohorts, adjusting for age and sex.

[1000] Table 22 below identifies the fold changes, FDRs, and p-values as determined by the differential expression analysis (DEA) performed for the markers provided in Table 16. These DEA results yielded 25 markers that satisfied FDR 10¹² and concordance (AUC)≥0.7.

[1001] Model #1 Analysis: The subject cohort (Model #1), which corresponds to Model 1, for the first differential expression analysis included 290 subjects diagnosed with pancreatic cancer and 194 healthy control subjects. The samples for Model #1 was obtained from Precision for Medicine (healthy controls) and both Indivumed and iSpecimen for cancer samples. The fold change, FDR, and p-value information relevant to the markers for Model 1 can be identified by cross-referencing that information provided in Table 22 with the marker list of Table 17A.

[1002] Model #2 Analysis: The subject cohort (Model #2), which corresponds to Model 2, for the second differential expression analysis included 308 subjects diagnosed with pancreatic cancer and 259 subjects that were either healthy controls or diagnosed with benign pancreatitis. The pancreatic cancer samples for Model #2 were obtained from Indivumed, iSpecimen, and University of Iowa, the healthy controls were obtained from Precision for Medicine, and the samples for pancreatitis were obtained from both Indivumed and University of Iowa.

[1003] Model #3 Analysis: The subject cohort (Model #3), which corresponds to Model 3, for the third differential expression analysis included 205 subjects diagnosed with Stage 1 or Stage 2 pancreatic cancer and 259 subjects that were either healthy controls or diagnosed with benign pancreatitis. The early stage pancreatic cancer samples for Model #3 were obtained from Indivumed, University of Iowa, and iSpecimen, the healthy control samples were obtained from Precision for Medicine, and the benign pancreatitis samples were obtained from both Indivumed and University of Iowa.

[1004] This different differential expression analysis was run for various peptide structures (e.g., hundreds of different peptide structures) across the markers listed in Table 22 for comparing healthy control vs. pancreatic cancer disease state (i.e., Model 1). Table 22 provides the statistical results (e.g., false discovery rates (FDRs), fold changes, p-values) for this analysis for the 55 peptide structure markers identified in Table 16. These 55 peptide structure markers were determined to be highly relevant markers for diagnosing pancreatic cancer.

TABLE 22
First Differential Expression Analysis (DEA)

| | | Fold | | |
|---|---|---|---|---|
| | | change | P-value | FDR |
| | | (healthy vs | (healthy vs | (healthy vs |
| PS-NAME | PS-ID NO. | pancreatic) | pancreatic) | pancreatic) |
| A1AT_107_5412 | 48 | 1.178 | 5.22E-02 | 8.59E-02 |
| A1AT_107_6512 | 49 | 1.629 | 2.21E-09 | 1.53E-08 |
| A1AT_107_NONGLYCOSYLATED | 50 | 0.286 | 5.10E-14 | 9.04E-13 |
| A1AT_70_5402 | 51 | 0.785 | 3.32E-25 | 2.21E-23 |
| A1BG_179_5402 | 52 | 1.092 | 1.53E-05 | 5.31E-05 |
| A2MG_1424_NONGLYCOSYLATED | 53 | 0.846 | 8.76E-20 | 3.59E-18 |
| A2MG_247_5200 | 54 | 0.622 | 6.16E-14 | 1.06E-12 |
| A2MG_247_5401 | 55 | 0.809 | 1.16E-19 | 4.41E-18 |
| A2MG_247MC_5401 | 56 | 0.828 | 4.36E-16 | 1.10E-14 |
| A2MG_55_5412 | 57 | 0.877 | 6.28E-05 | 1.94E-04 |
| A2MG_869_5401 | 58 | 1.295 | 7.79E-26 | 5.92E-24 |
| A2MG_869_5402 | 59 | 1.341 | 5.32E-18 | 1.67E-16 |
| A2MG_869_6301 | 60 | 1.155 | 1.03E-15 | 2.49E-14 |
| AACT_271_6512 | 61 | 1.036 | 5.87E-01 | 6.61E-01 |
| AGP1_93_7614 | 62 | 1.35 | 1.94E-09 | 1.36E-08 |
| AGP12_56_5412 | 63 | 1.213 | 3.37E-05 | 1.11E-04 |
| AGP12_72_7601 | 64 | 0.919 | 1.35E-01 | 1.99E-01 |
| AGP12_72MC_6503 | 65 | 0.637 | 5.53E-23 | 3.08E-21 |
| APOB_3895_5401 | 66 | 0.757 | 1.81E-09 | 1.30E-08 |
| APOB_983_5402 | 67 | 1.286 | 9.29E-28 | 9.50E-26 |
| APOH_253_5412 | 68 | 1.697 | 3.31E-17 | 9.26E-16 |
| APOM_135_5401 | 69 | 1.033 | 2.19E-01 | 3.03E-01 |
| APOM_135_5402 | 70 | 1.163 | 3.91E-15 | 7.99E-14 |
| C1S_174_5402 | 71 | 0.815 | 2.40E-12 | 3.20E-11 |
| CERU_397_5412 | 72 | 1.298 | 4.00E-08 | 2.29E-07 |
| CO5_741_5401 | 73 | 0.961 | 8.67E-02 | 1.33E-01 |
| CO5_741_5402 | 74 | 0.9 | 7.47E-15 | 1.42E-13 |
| FETUA_156_5412 | 75 | 1.512 | 2.26E-15 | 4.80E-14 |
| HEMO_187_5412 | 76 | 1.232 | 1.50E-15 | 3.35E-14 |
| HEMO_453_5401 | 77 | 0.755 | 3.87E-19 | 1.29E-17 |
| HEMO_64_5402 | 78 | 1.167 | 4.45E-14 | 8.17E-13 |
| HPT_207_121015 | 79 | 1.523 | 5.46E-13 | 8.30E-12 |
| HRG_125_5402 | 80 | 1.205 | 5.79E-23 | 3.08E-21 |
| IC1_238_5412 | 81 | 1.955 | 1.07E-27 | 9.50E-26 |
| IC1_253_5402 | 82 | 1.628 | 6.84E-50 | 1.21E-47 |
| IC1_253_5412 | 83 | 1.847 | 2.14E-58 | 5.70E-56 |
| IC1_253_6503 | 84 | 1.121 | 2.07E-03 | 4.81E-03 |
| IC1_253_6513 | 85 | 1.497 | 3.89E-21 | 1.72E-19 |
| IC1_352_5402 | 86 | 1.571 | 2.25E-61 | 1.20E-58 |
| IGA12_144_3500 | 87 | 1.201 | 3.68E-05 | 1.20E-04 |
| IGG1_297_3410 | 88 | 1.297 | 4.49E-13 | 7.02E-12 |
| IGG1_297_3500 | 89 | 1.372 | 9.07E-03 | 1.81E-02 |
| IGG1_297_3510 | 90 | 1.228 | 3.71E-07 | 1.79E-06 |
| IGG2_297_3500 | 91 | 0.533 | 1.69E-08 | 1.02E-07 |
| IGM_439_9200 | 92 | 2.794 | 4.58E-12 | 5.95E-11 |
| KLKB1_494_6503 | 93 | 1.533 | 1.30E-16 | 3.46E-15 |
| QUANTPEP-A2GL_DLLLPQPDLR | 94 | 1.532 | 8.65E-18 | 6.44E-16 |
| QUANTPEP- | | | | |
| APOA1_DLATVYVDVLK | 95 | 0.697 | 6.52E-19 | 7.77E-17 |
| QUANTPEP-APOM_AFLLTPR | 96 | 0.763 | 1.08E-19 | 1.60E-17 |
| QUANTPEP-B2M_VNHVTLSQPK | 97 | 1.176 | 5.45E-06 | 2.21E-05 |
| QUANTPEP- | 98 | 0.636 | 8.35E-09 | 6.46E-08 |
| FINC_SYTITGLQPGTDYK | | | | |
| QUANTPEP- | 99 | 0.784 | 1.94E-18 | 1.93E-16 |
| TTR_TSESGELHGLTTEEEFVEGIY | | | | |
| K | | | | |
| SHBG_380_5402 | 100 | 1.028 | 5.18E-01 | 6.04E-01 |
| TRFE_432_5401 | 101 | 0.729 | 3.44E-22 | 1.66E-20 |
| VTNC_169_5401 | 102 | 0.71 | 3.25E-19 | 1.15E-17 |

### B. Training a Binary Classification Model

[1005] A full panel of biomarkers were included in training a binary classification model for diagnosing pancreatic cancer status. For the various models discussed herein, the total number of subjects was split into 70% training (n=159) and 30% testing (n=67). For the training set, repeated, 10-fold cross-validation was used to select optimal hyperparameters for LASSO, and then these hyperparameters were used on the entire training set develop one predictive logistic regression model. This model was then blindly used to predict pancreatic cancer status in the test set. Overall, 22 markers, 19 markers, or 17 markers were left with non-zero weights after LASSO shrinkage for associated Models 1, 2 and 3, respectively. These 22, 19 and 17 markers are identified in Tables 17A, 17B and 17C above. FIGS. 20-23 are example explanatory illustrations that correspond to Model 1. For example, FIG. 20 is a marker-wise hierarchically-clustered heat map comparing z-score values of biomarker expression levels for retained biomarkers in Model 1 across patent data set, in accordance with one or more embodiments. Columns represent patient samples, grouped by healthy control and pancreatic cancer status, and whether the model correctly or incorrectly classified a specific patient sample.

[1006] FIG. 21 is a probability dotplot illustrating probabilities of pancreatic cancer across training and test data across various patient sample entities, including pancreatic cancer stage, in accordance with one or more embodiments.

[1007] FIG. 22 is a probability dotplot illustrating probabilities of pancreatic cancer across training and test data across various sample sources and entities, in accordance with one or more embodiments.

[1008] FIG. 23 is an example plot of a receiver operating characteristic (ROC) curve for Model 1 for the training set and testing set in accordance with one or more embodiments. The plot illustrates specificity versus sensitivity. The area under the curve (AUC) for the training set was found to be 0.989 and the AUC for the testing set was found to be 0.988.

### XII. Exemplary Embodiments for Breast Cancer Diagnosis and Treatment

[1009] The present disclosure concerns embodiments for systems, methods, and compositions related to identification of breast cancer in an individual. The embodiments concern classifying biological samples, measuring for one or more certain markers from a biological sample, assaying for one or more certain markers from a biological sample, determining the presence of one or more certain markers from a biological sample, and so forth. The embodiments of the disclosure utilize models that accurately either identify that an individual has breast cancer or that has a higher risk for breast cancer over the general population based on the presence of one or more markers in sample(s) from the individual. The individual may or may not be at a higher risk for breast cancer based on family or personal history; age (e.g., 50 or older); having one or more genetic markers associated with a risk for breast cancer (BRCA1 and/or BRCA2); reproductive history (e.g., onset of menses before age 12, starting menopause after age 55, first pregnancy after age 30, not breastfeeding, never having a full-term pregnancy, or a combination thereof); having dense breasts; exposure to radiation therapy; taking hormones; being overweight; having diabetes, workplace exposure to certain chemicals; one or more inherited genetic syndromes; or a combination thereof.

[1010] In various embodiments of the disclosure, an individual is in need of identifying whether or not they have breast cancer or a risk thereof. The individual may be subjected to measuring or testing for one or more markers encompassed herein as a matter of routine health maintenance or because of a specific concern, for example, such as the presence of one or more risk factors and/or one or more symptoms of breast cancer. The individual may be in need of such identification based on any one of the risk factors noted above, or the individual may be in need of such identification based on having one or more symptoms of breast cancer, such as having a new lump in the breast or armpit; thickening or swelling of part of the breast; irritation or dimpling of breast skin; redness or flaky skin in the nipple area of the breast; pulling in of the nipple or pain in the nipple area; or a combination thereof. In some cases, the analysis of the sample of the individual as described herein is the sole test utilized for identifying breast cancer, whereas in other cases a medical provider may utilize one or more other tests, such as mammogram; ultrasound; magnetic resonance imaging; CT scan; biopsy; a combination thereof, and so forth. In particular embodiments, measuring for one or more peptide structure markers as in Table 9 are utilized alone or in conjunction with one or more of these tests.

[1011] The systems, methods, and compositions encompassed herein are sufficiently specific to utilize markers that distinguish between control and breast cancer or between control and early stage breast cancer. In some embodiments, the markers are accurate regardless of the status of one or more characteristics of the individual: biological sex, sample source, sample collection, smoker status, or age, as examples.

[1012] In some embodiments, the individual is suspected of having breast cancer or is at risk for breast cancer and is in need of diagnosis thereof in addition to identification whether it is early stage breast cancer. In various embodiments, the individual is known to have breast cancer and is in need of determining whether it is early stage breast cancer, such as to determine a treatment regimen for the cancer. In specific embodiments, the same test that identifies whether an individual has breast cancer determines whether the breast cancer is early stage.

[1013] In various embodiments, the sample for analysis for breast cancer identification is a fluid from the individual, such as peripheral blood, serum, plasma, and/or nipple aspirate from the individual. The present disclosure provides for measuring for one or more circulating glycoproteins, glycopeptides, or non-glycosylated peptides in blood, serum, or plasma to diagnose or identify the presence of breast cancer and/or to identify early stage breast cancer in an individual. In various embodiments, the sample is measured for 1, 2, 3, 4, 5, 6, 7, 8, 9, 10, 11, 12, 13, 14, 15, 16, 17, or all 18 of the peptides of Table 9. In various embodiments, the sample is measured for 1, 2, 3, 4, 5, 6, or all 7 of the peptides of Table 10A. In various embodiments, the sample is measured for 1, 2, 3, 4, 5, 6, 7, 8 or all 8 of the peptides of Table 10B.

[1014] Embodiments of the disclosure include methods of classifying samples, including peripheral blood, serum, or plasma samples, from an individual suspected of having, known to have, or at risk for having breast cancer by measuring from the sample for one or more glycopeptides and/or non-glycosylated peptides encompassed herein. The methods encompass whether or not breast cancer is identified in the individual. In some cases, the measuring identifies the individual as not having breast cancer or as having breast cancer. In various embodiments, in cases wherein the individual has one or more glycopeptides and/or non-glycosylated peptides of Table 9, or certain levels thereof compared to control or healthy individuals, the individual may be determined to have breast cancer. In various embodiments, in cases wherein the individual lacks the glycopeptides and/or non-glycosylated peptides of Table 9, or has certain levels thereof compared to control or healthy individuals, the individual may be determined not to have breast cancer. The measuring may identify the individual as having a particular stage of breast cancer, including at least early stage. In specific cases, the measuring comprises successive or concomitant steps of identifying that the individual has breast cancer and whether the individual has early stage breast cancer.

[1015] In various embodiments, an individual at risk for having breast cancer is subjected to methods of the disclosure to identify, or not, the presence of breast cancer. Such methods also measure for one or more glycopeptides and/or non-glycosylated peptides encompassed herein. In various embodiments, in cases wherein the individual has one or more glycopeptides and/or non-glycosylated peptides of Table 9, the individual may be determined to have breast cancer. In various embodiments, in cases wherein the individual lacks the glycopeptides and/or non-glycosylated peptides of Table 9, the individual may be determined not to have breast cancer and is not treated for breast cancer. The individual may be of any kind, although in specific cases individual at risk for having breast cancer has a family history or one or more other risk factors.

[1016] Embodiments of the disclosure include methods of predicting that an individual will have breast cancer, including early stage breast cancer, or identifying early stage breast cancer in an individual, by measuring for one or more glycopeptides or non-glycosylated peptides from Table 9 in one or more samples from the individual. The individual may be known to have breast cancer or may be suspected of having breast cancer In various embodiments, the sample is measured for 1, 2, 3, 4, 5, 6, 7, 8, 9, 10, 11, 12, 13, 14, 15, 16, 17, or all 18 of the peptides of Table 9. In various embodiments, the sample is measured for 1, 2, 3, 4, 5, 6, or all 7 of the peptides of Table 10A. In various embodiments, the sample is measured for 1, 2, 3, 4, 5, 6, 7, or all 8 of the peptides of Table 10B.

[1017] In embodiments wherein the measuring identifies the individual as having breast cancer, the individual may be recommended to take action to treat the breast cancer, such as with at least one of radiation therapy, chemotherapy or drug therapy (Abemaciclib; Ado-Trastuzumab Emtansine; Everolimus; Alpelisib; Anastrozole; Pamidronate Disodium; Anastrozole; Exemestane; Capecitabine; Cyclophosphamide; Docetaxel; Doxorubicin Hydrochloride; Epirubicin Hydrochloride; Fam-Trastuzumab Deruxtecan-nxki; Epirubicin Hydrochloride; Eribulin Mesylate; 5-Fluoro uracil; Fam-Trastuzumab Deruxtecan-nxki; Toremifene; Fulvestrant; Letrozole; Fluorouracil Injection; Fulvestrant; Gemcitabine Hydrochloride; Goserelin Acetate; Eribulin Mesylate; Trastuzumab; Palbociclib; Gemcitabine Hydrochloride; Ixabepilone; Ixabepilone; Ado-Trastuzumab Emtansine; Pembrolizumab; Ribociclib; Lapatinib Ditosylate; Letrozole; Olaparib; Margetuximab-cmkb; Megestrol Acetate; Methotrexate Sodium; Neratinib Maleate; Neratinib Maleate; Olaparib; Paclitaxel; Palbociclib; Pamidronate Disodium; Pembrolizumab; Pertuzumab; Alpelisib; Ribociclib; Sacituzumab Govitecan-hziy; Tamoxifen Citrate; Talazoparib Tosylate; Talazoparib Tosylate; Tamoxifen Citrate; Docetaxel; Atezolizumab; Thiotepa; Thiotepa; Toremifene; Trastuzumab; Trastuzumab and Hyaluronidase-oysk; Methotrexate Sodium; Sacituzumab Govitecan-hziy; Tucatinib; Tucatinib; Lapatinib Ditosylate; Abemaciclib; Vinblastine Sulfate; Capecitabine; Goserelin Acetate; or a combination thereof.), chemoradiotherapy, surgery, hormone therapy and/or a targeted drug therapy, as examples.

[1018] Embodiments of the disclosure include methods of treating breast cancer in a subject, the method comprising: receiving a biological sample from the subject; determining a quantity of at least 1 peptide structure identified in Table 9 in the biological sample using a multiple reaction monitoring mass spectrometry (MRM-MS) system; analyzing the quantity of each peptide structure using at least one machine learning model to generate a disease indicator; generating a diagnosis output based on the disease indicator that classifies the biological sample as evidencing that the subject has breast cancer; and administering a therapeutically effective amount of the treatment for breast cancer. The treatment may be of any kind, including at least one or more of radiation therapy, chemotherapy, chemoradiotherapy, surgery, or a targeted drug therapy. In specific embodiments, the method further comprises preparing the biological sample to form a prepared sample comprising a set of peptide structures; and inputting the prepared sample into the MRM-MS system using a liquid chromatography system. The method may also be further defined as determining a quantity of at least 1 peptide structure identified in Table 9 in the biological sample using a multiple reaction monitoring mass spectrometry (MRM-MS) system; analyzing the quantity of each peptide structure using at least one machine learning model to generate a disease indicator; generating a diagnosis output based on the disease indicator that classifies the biological sample as evidencing that the subject has BC; and administering a therapeutically effective amount of the treatment for BC.

[1019] Embodiments of the disclosure include methods of treating breast cancer (BC) in a subject, the method comprising: receiving a biological sample from the subject; determining a quantity of at least 1 peptide structure identified in Table 10A or 10B in the biological sample using a multiple reaction monitoring mass spectrometry (MRM-MS) system; analyzing the quantity of each peptide structure using at least one machine learning model to generate a disease indicator; generating a diagnosis output based on the disease indicator that classifies the biological sample as evidencing that the patient has breast cancer; and administering a therapeutically effective amount of the treatment for breast cancer, such as at least one of radiation therapy, chemotherapy, chemoradiotherapy, surgery, or a targeted drug therapy. In various embodiments, the method may further comprise preparing the biological sample to form a prepared sample comprising a set of peptide structures; and inputting the prepared sample into the MRM-MS system using a liquid chromatography system. In specific embodiments, the method may be further defined as determining a quantity of at least 1 peptide structure identified in Table 10A or 10B in the biological sample using a multiple reaction monitoring mass spectrometry (MRM-MS) system; analyzing the quantity of each peptide structure using at least one machine learning model to generate a disease indicator; generating a diagnosis output based on the disease indicator that classifies the biological sample as evidencing that the subject has breast cancer; and administering a therapeutically effective amount of the treatment for breast cancer.

[1020] Certain embodiments of the disclosure encompass methods of designing a treatment for a subject diagnosed with a breast cancer state, the method comprising: designing a therapeutic regimen for treating the subject in response to measuring that a biological sample obtained from the subject evidences the state using part or all of any method encompassed herein, including identifying one or more peptide structures of Table 9, 10A, or 10B. Various embodiments include methods of planning a treatment for a subject diagnosed with a breast cancer (BC) state, the method comprising: generating a treatment plan for treating the subject in response to measuring that a biological sample obtained from the subject evidences the state using part or all of any method encompassed herein, including identifying one or more peptide structures of Table 9, 10A, or 10B.

[1021] Embodiments of the disclosure include methods of treating a subject diagnosed with a breast cancer state, the method comprising: administering to the subject a therapeutically effective amount of one or more therapeutics or treatments to treat the subject based on measuring that a biological sample obtained from the subject evidences the state using part or all of any method encompassed herein, including that identifies one or more peptide structures of Table 9, 10A, or 10B.

[1022] In various embodiments, methods of treating a subject diagnosed with a breast cancer state are encompassed herein, the method comprising: selecting a therapeutic or treatment to treat the subject based on determining that the subject is responsive to the therapeutic using any method encompassed herein, including that identifies one or more peptide structures of Table 9, 10A, or 10B.

[1023] In various embodiments, methods are included for classifying a sample from an individual suspected of having, known to have, or at risk for breast cancer, comprising the step of measuring from the sample for one or more glycopeptides and/or non-glycosylated peptides in Table 9. In specific embodiments, the measuring identifies the individual as not having breast cancer or as having breast cancer. The measuring may identify the individual as having early stage BC, in specific embodiments, and the detection of early stage malignancy is useful such that a treatment path may be determined as soon as possible. In certain embodiments, the measuring comprises successive or concomitant steps of identifying that the individual has breast cancer and that the individual has early stage breast cancer. The individual may or may not be at risk for breast cancer. In specific cases, when the measuring identifies the individual as having breast cancer, the individual is administered an effective amount of at least one of radiation therapy, chemotherapy, chemoradiotherapy, surgery, or a targeted drug therapy. In various embodiments, the sample is measured for 2, 3, 4, 5, 6, 7, 8, 9, 10, 11, 12, 13, 14, 15, 16, 17, or all 18 of the glycopeptides and/or non-glycosylated peptides of Table 9.

[1024] Embodiments of the disclosure include methods of diagnosing breast cancer in an individual, comprising the step of identifying 1, 2, 3, 4, 5, 6, 7, 8, 9, 10, 11, 12, 13, 14, 15, 16, 17, or all 18 of the peptide structures identified in Table 9 from a sample from the individual. Embodiments of the disclosure include methods of diagnosing breast cancer in an individual, comprising the step of identifying 1, 2, 3, 4, 5, 6, or all 7 of the peptide structures identified in Table 10A from a sample from the individual. Embodiments of the disclosure include methods of diagnosing breast cancer in an individual, comprising the step of identifying 1, 2, 3, 4, 5, 6, 7, or all 8 of the peptide structures identified in Table 10B from a sample from the individual.

### XIII

### Exemplary Embodiments for Pancreatic Cancer Diagnosis and Treatment

[1025] The present disclosure concerns embodiments for systems, methods, and compositions related to identification of pancreatic cancer in an individual. The embodiments concern classifying biological samples, measuring for one or more certain markers from a biological sample, assaying for one or more certain markers from a biological sample, determining the presence of one or more certain markers from a biological sample, and so forth. The embodiments of the disclosure utilize models that accurately either identify that an individual has pancreatic cancer or that has a higher risk for pancreatic cancer over the general population based on the presence of one or more markers in sample(s) from the individual. The individual may or may not be at a higher risk for pancreatic cancer based on family history, one or more genetic markers associated with a risk for pancreatic cancer, being overweight, having diabetes, having chronic pancreatitis, workplace exposure to certain chemicals, advanced age, one or more inherited genetic syndromes, a diet rich in red and/or processed meats, or a combination thereof.

[1026] In various embodiments of the disclosure, an individual is in need of identifying whether or not they have pancreatic cancer or a risk thereof. The individual may be subjected to measuring or testing for one or more markers encompassed herein as a matter of routine health maintenance or because of a specific concern, for example, such as the presence of one or more risk factors and/or one or more symptoms of pancreatic cancer. The individual may be in need of such identification based on any one of the risk factors noted above, or the individual may be in need of such identification based on having one or more symptoms of pancreatic cancer, such as abdominal pain, including that radiates to the back; loss of appetite or unintended weight loss; jaundice; light-colored stools; dark-colored urine; itchy skin; new diagnosis of diabetes or existing diabetes that's becoming more difficult to control; blood clots; or a combination thereof. In some cases, the analysis of the sample of the individual is the sole test utilized for identifying pancreatic cancer, whereas in other cases a medical provider may utilize one or more other tests, such as ultrasound, magnetic resonance imaging, CT scan, Endoscopic retrograde cholangiopancreatography, Magnetic resonance cholangiopancreatography, Percutaneous transhepatic cholangiography, Positron emission tomography (PET) scan, angiography, biopsy, blood tests (Such as measuring for CA 19-9 and/or carcinoembryonic antigen (CEA), a combination thereof, and so forth. In particular embodiments, measuring for one or more peptide structure markers as in Table 16 are utilized alone or in conjunction with one or more of these tests.

[1027] The systems, methods, and compositions encompassed herein are sufficiently specific to utilize markers that distinguish between control and pancreatic cancer, including in various embodiments markers that themselves are not associated with inflammation, such as inflammation associated with pancreatic cancer. In some embodiments, the markers are accurate regardless of the status of one or more characteristics of the individual: biological sex, sample source, sample collection, smoker status, or age.

[1028] In some embodiments, the individual is suspected or having pancreatic cancer or is at risk for pancreatic cancer and is in need of diagnosis thereof in addition to identification whether it is early stage pancreatic cancer. In various embodiments, the individual is known to have pancreatic cancer and is in need of determining whether it is early stage pancreatic cancer, such as to determine a treatment regimen for the cancer. In specific embodiments, the same test that identifies whether an individual has pancreatic cancer determines whether the pancreatic cancer is early stage.

[1029] In various embodiments, the sample for analysis for pancreatic cancer identification is a fluid from the individual, such as peripheral blood, serum, or plasma from the individual. The present disclosure provides for measuring for one or more circulating glycoproteins, glycopeptides, or non-glycosylated peptides in blood, serum, or plasma to diagnose or identify the presence of pancreatic cancer and/or to identify early stage pancreatic cancer in an individual. In various embodiments, the sample is measured for 1, 2, 3, 4, 5, 6, 7, 8, 9, 10, 11, 12, 13, 14, 15, 16, 17, 18, 19, 20, 21, 22, 23, 24, 25, 26, 27, 28, 29, 30, 31, 32, 33, 34, 35, 36, 37, 38, 39, 40, 41, 42, 43, 44, 45, 46, 47, 48, 49, 50, 51, 52, 53, 54, or all 55 of the peptides of Table 16. In various embodiments, the sample is measured for 1, 2, 3, 4, 5, 6, 7, 8, 9, 10, 11, 12, 13, 14, 15, 16, 17, 18, 19, 20, 21, or all 22 of the peptides of Table 17A. In various embodiments, the sample is measured for 1, 2, 3, 4, 5, 6, 7, 8, 9, 10, 11, 12, 13, 14, 15, 16, 17, 18, or all 19 of the peptides of Table 17B. In various embodiments, the sample is measured for 1, 2, 3, 4, 5, 6, 7, 8, 9, 10, 11, 12, 13, 14, 15, 16, or all 17 of the peptides of Table 17C.

[1030] Embodiments of the disclosure include methods of classifying samples, including peripheral blood, serum, or plasma samples, from an individual suspected of having, known to have, or at risk for having pancreatic cancer by measuring from the sample for one or more glycopeptides and/or non-glycosylated peptides encompassed herein. The methods encompass whether or not pancreatic cancer is identified in the individual. In some cases, the measuring identifies the individual as not having pancreatic cancer or as having pancreatic cancer. In various embodiments, in cases wherein the individual has one or more glycopeptides and/or non-glycosylated peptides of Table 16, or certain levels thereof compared to control or healthy individuals, the individual may be determined to have pancreatic cancer. In various embodiments, in cases wherein the individual lacks the glycopeptides and/or non-glycosylated peptides of Table 16, or has certain levels thereof compared to control or healthy individuals, the individual may be determined not to have pancreatic cancer. The measuring may identify the individual as having a particular stage of pancreatic cancer, including at least early stage. In specific cases, the measuring comprises successive or concomitant steps of identifying that the individual has pancreatic cancer and whether the individual has early stage pancreatic cancer.

[1031] In various embodiments, an individual at risk for having pancreatic cancer is subjected to methods of the disclosure to identify, or not, the presence of pancreatic cancer. Such methods also measure for one or more glycopeptides and/or non-glycosylated peptides encompassed herein. In various embodiments, in cases wherein the individual has one or more glycopeptides and/or non-glycosylated peptides of Table 16, the individual may be determined to have pancreatic cancer. In various embodiments, in cases wherein the individual lacks the glycopeptides and/or non-glycosylated peptides of Table 16, the individual may be determined not to have pancreatic cancer and is not treated for pancreatic cancer. The individual may be of any kind, although in specific cases individual at risk for having pancreatic cancer has a family history or one or more other risk factors.

[1032] Embodiments of the disclosure include methods of predicting that an individual will have pancreatic cancer, including early stage pancreatic cancer, or identifying early stage pancreatic cancer in an individual, by measuring for one or more glycopeptides or non-glycosylated peptides from Table 16 in one or more samples from the individual. The individual may be known to have pancreatic cancer or may be suspected of having pancreatic cancer In various embodiments, the sample is measured for 1, 2, 3, 4, 5, 6, 7, 8, 9, 10, 11, 12, 13, 14, 15, 16, 17, 18, 19, 20, 21, 22, 23, 24, 25, 26, 27, 28, 29, 30, 31, 32, 33, 34, 35, 36, 37, 38, 39, 40, 41, 42, 43, 44, 45, 46, 47, 48, 49, 50, 51, 52, 53, 54, or all 55 of the peptides of Table 16. In various embodiments, the sample is measured for 1, 2, 3, 4, 5, 6, 7, 8, 9, 10, 11, 12, 13, 14, 15, 16, 17, 18, 19, 20, 21, or all 22 of the peptides of Table 17A. In various embodiments, the sample is measured for 1, 2, 3, 4, 5, 6, 7, 8, 9, 10, 11, 12, 13, 14, 15, 16, 17, 18, or all 19 of the peptides of Table 17B. In various embodiments, the sample is measured for 1, 2, 3, 4, 5, 6, 7, 8, 9, 10, 11, 12, 13, 14, 15, 16, or all 17 of the peptides of Table 17C.

[1033] In embodiments wherein the measuring identifies the individual as having pancreatic cancer, the individual may be recommended to take action to treat the pancreatic cancer, such as with at least one of radiation therapy, chemotherapy (Gemcitabine; 5-fluorouracil (5-FU); Oxaliplatin; Albumin-bound paclitaxel; Capecitabine; Cisplatin; Irinotecan; Paclitaxel; and/or Docetaxel), chemoradiotherapy, surgery, and/or a targeted drug therapy, as examples.

[1034] Embodiments of the disclosure include methods of treating pancreatic cancer in a subject, the method comprising: receiving a biological sample from the subject; determining a quantity of at least 1 peptide structure identified in Table 16 in the biological sample using a multiple reaction monitoring mass spectrometry (MRM-MS) system; analyzing the quantity of each peptide structure using at least one machine learning model to generate a disease indicator; generating a diagnosis output based on the disease indicator that classifies the biological sample as evidencing that the subject has pancreatic cancer; and administering a therapeutically effective amount of the treatment for pancreatic cancer. The treatment may be of any kind, including at least one or more of radiation therapy, chemotherapy, chemoradiotherapy, surgery, or a targeted drug therapy. In specific embodiments, the method further comprises preparing the biological sample to form a prepared sample comprising a set of peptide structures; and inputting the prepared sample into the MRM-MS system using a liquid chromatography system. The method may also be further defined as determining a quantity of at least 1 peptide structure identified in Table 16 in the biological sample using a multiple reaction monitoring mass spectrometry (MRM-MS) system; analyzing the quantity of each peptide structure using at least one machine learning model to generate a disease indicator; generating a diagnosis output based on the disease indicator that classifies the biological sample as evidencing that the subject has PC; and administering a therapeutically effective amount of the treatment for PC.

[1035] Embodiments of the disclosure include methods of treating pancreatic cancer (PC) in a subject, the method comprising: receiving a biological sample from the subject; determining a quantity of at least 1 peptide structure identified in Table 17A, 17B, or 17C in the biological sample using a multiple reaction monitoring mass spectrometry (MRM-MS) system; analyzing the quantity of each peptide structure using at least one machine learning model to generate a disease indicator; generating a diagnosis output based on the disease indicator that classifies the biological sample as evidencing that the patient has pancreatic cancer; and administering a therapeutically effective amount of the treatment for pancreatic cancer, such as at least one of radiation therapy, chemotherapy, chemoradiotherapy, surgery, or a targeted drug therapy. In various embodiments, the method may further comprise preparing the biological sample to form a prepared sample comprising a set of peptide structures; and inputting the prepared sample into the MRM-MS system using a liquid chromatography system. In specific embodiments, the method may be further defined as determining a quantity of at least 1 peptide structure identified in Table 17A, 17B, or 17C in the biological sample using a multiple reaction monitoring mass spectrometry (MRM-MS) system; analyzing the quantity of each peptide structure using at least one machine learning model to generate a disease indicator; generating a diagnosis output based on the disease indicator that classifies the biological sample as evidencing that the subject has pancreatic cancer; and administering a therapeutically effective amount of the treatment for pancreatic cancer.

[1036] Certain embodiments of the disclosure encompass methods of designing a treatment for a subject diagnosed with a pancreatic cancer state, the method comprising: designing a therapeutic regimen for treating the subject in response to measuring that a biological sample obtained from the subject evidences the state using part or all of any method encompassed herein, including identifying one or more peptide structures of Table 16, 17A, 17B, or 17C. Various embodiments include methods of planning a treatment for a subject diagnosed with a pancreatic cancer (PC) state, the method comprising: generating a treatment plan for treating the subject in response to measuring that a biological sample obtained from the subject evidences the state using part or all of any method encompassed herein, including identifying one or more peptide structures of Table 16, 17A, 17B, or 17C.

[1037] Embodiments of the disclosure include methods of treating a subject diagnosed with a pancreatic cancer state, the method comprising: administering to the subject a therapeutically effective amount of one or more therapeutics or treatments to treat the subject based on measuring that a biological sample obtained from the subject evidences the state using part or all of any method encompassed herein, including that identifies one or more peptide structures of Table 16, 17A, 17B, or 17C.

[1038] In various embodiments, methods of treating a subject diagnosed with a pancreatic cancer state are encompassed herein, the method comprising: selecting a therapeutic or treatment to treat the subject based on determining that the subject is responsive to the therapeutic using any method encompassed herein, including that identifies one or more peptide structures of Table 16, 17A, 17B, or 17C.

[1039] In various embodiments, methods are included for classifying a sample from an individual suspected of having, known to have, or at risk for pancreatic cancer, comprising the step of measuring from the sample for one or more glycopeptides and/or non-glycosylated peptides in Table 16. In specific embodiments, the measuring identifies the individual as not having pancreatic cancer or as having pancreatic cancer. The measuring may identify the individual as having early stage PC, in specific embodiments, and the detection of early stage malignancy is useful such that a treatment path may be determined as soon as possible. In certain embodiments, the measuring comprises successive or concomitant steps of identifying that the individual has pancreatic cancer and that the individual has early stage pancreatic cancer. The individual may or may not be at risk for pancreatic cancer. In specific cases, when the measuring identifies the individual as having pancreatic cancer, the individual is administered an effective amount of at least one of radiation therapy, chemotherapy, chemoradiotherapy, surgery, or a targeted drug therapy. In various embodiments, the sample is measured for 2, 3, 4, 5, 6, 7, 8, 9, 10, 11, 12, 13, 14, 15, 16, 17, 18, 19, 20, 21, 22, 23, 24, 25, 26, 27, 28, 29, 30, 31, 32, 33, 34, 35, 36, 37, 38, 39, 40, 41, 42, 43, 44, 45, 46, 47, 48, 49, 50, 51, 52, 53, 54, or all of the glycopeptides and/or non-glycosylated peptides of Table 16.

[1040] Embodiments of the disclosure include methods of diagnosing pancreatic cancer in an individual, comprising the step of identifying 1, 2, 3, 4, 5, 6, 7, 8, 9, 10, 11, 12, 13, 14, 15, 16, 17, 18, 19, 20, 21, 22, 23, 24, 25, 26, 27, 28, 29, 30, 31, 32, 33, 34, 35, 36, 37, 38, 39, 40, 41, 42, 43, 44, 45, 46, 47, 48, 49, 50, 51, 52, 53, 54, or all 55 of the peptide structures identified in Table 16 from a sample from the individual. Embodiments of the disclosure include methods of diagnosing pancreatic cancer in an individual, comprising the step of identifying 1, 2, 3, 4, 5, 6, 7, 8, 9, 10, 11, 12, 13, 14, 15, 16, 17, 18, 19, 20, 21, or all 22 of the peptide structures identified in Table 17A from a sample from the individual. Embodiments of the disclosure include methods of diagnosing pancreatic cancer in an individual, comprising the step of identifying 1, 2, 3, 4, 5, 6, 7, 8, 9, 10, 11, 12, 13, 14, 15, 16, 17, 18, or all 19 of the peptide structures identified in Table 17B from a sample from the individual. Embodiments of the disclosure include methods of diagnosing pancreatic cancer in an individual, comprising the step of identifying 1, 2, 3, 4, 5, 6, 7, 8, 9, 10, 11, 12, 13, 14, 15, 16, or all 17 of the peptide structures identified in Table 17C from a sample from the individual.

### XIV

### Exemplary Methodologies Relating to Quality Control of Samples Based on Peptide Structure Data Analysis

### XIV. A. Exemplary Methodology—Based on Table 23

[1041] FIG. 24 is a flowchart of a method S2400 for quality control (QC) of samples, in accordance with various embodiments. Method S2400 may be implemented using, for example, at least a portion of workflow 100 as described in FIGS. 1, 2A, and 2B and/or analysis system 300 as described in FIG. 3. Method S2400 may be used to generate a final output that includes at least an identification of control issue associated with a batch or a cohort of samples.

[1042] As illustrated in FIG. 24, method S2400 includes, at step S2410, analyzing peptide structure data for each sample of a cohort using a model to generate a predicted age associated for each sample of the cohort, wherein each sample corresponds to a subject and has an associated chronological age. The peptide structure data may be, for example, one example of an implementation of peptide structure data 310 in FIG. 3. The peptide structure data may include quantification data for each peptide structure of a plurality of peptide structures. The quantification data may include, for example, one or more quantification metrics for each peptide structure of the plurality of peptide structures. A quantification metric for a peptide structure may be, for example, but is not limited to, a relative quantity, an adjusted quantity, a normalized quantity, a relative concentration, an adjusted concentration, or a normalized concentration. In this manner, the quantification data for a given peptide structure provides an indication of the abundance of the peptide structure in the biological sample. In some cases, at least one peptide structure includes a glycopeptide structure having a peptide sequence and a glycan structure linked to the peptide sequence at a linking site of the peptide sequence, as identified in Table 23, with the peptide sequence being one of SEQ ID NOS: 163-174 in Table 23 below.

[1043] In one or more embodiments, the model may be implemented using a binary classification model (e.g., a linear regression model). In some examples, the regression model may be, for example, penalized multivariable regression model. In various embodiments, the quantification data may be computed using a weight coefficient associated with each peptide structure, the weight coefficient of a corresponding peptide structure of the peptide structures may indicate the relative significance of the corresponding peptide structure to the disease indicator.

[1044] In some embodiments, the model may include computing a peptide structure profile for the biological sample that identifies a weighted value for each peptide structure. The weighted value for a peptide structure of the peptide structures may be a product of a quantification metric for the peptide structure identified from the peptide structure data and a weight coefficient for the peptide structure. The disease indicator may be computed using the peptide structure profile. For example, the disease indicator may be a logit equal to the sum of the weighted values for the peptide structures plus an intercept value. The intercept value may be determined during the training of the model.

[1045] The peptide structure profile for a given peptide structure may include a corresponding feature-relative abundance, concentration, site occupancy—for that peptide structure. The relative abundance may be a normalized relative abundance; the concentration may be normalized concentration. In some cases, two peptide structure profiles may be computed for the same peptide structure, each profile corresponding to a different feature. For example, a first peptide structure profile may include a relative abundance for a corresponding peptide structure and a second peptide structure profile may include a concentration for the same corresponding peptide structure.

[1046] As illustrated in FIG. 24, method S2400 further includes, at step S2420, identifying a quality control issue associated with the chronological age for the cohort based on a correlation coefficient based on the predicted age and the chronological age for each sample of the cohort. In various embodiments, the identifying the quality control issue associated with the chronological age for the cohort is based on the correlation coefficient. In various embodiments, the correlation coefficient does not fall within a predetermined range of values. In various embodiments, the predetermined range of values ranges from about 0 to about 0.2. In various embodiments, the quality control issue includes an error of mislabeled samples or an error from sample preparation. In various embodiments, the quality control issue includes a systemic measurement or an instrument error.

[1047] In various embodiments, the peptide structure data can include a set of age-associated glycosylation biomarkers, and a set of corresponding signals associated with each of the age-associated glycosylation biomarkers. In various embodiments, the set of corresponding signals is proportional to an amount of each of the age-associated glycosylation biomarkers in the sample. In various embodiments, the model can be based on the set of age-associated glycosylation biomarkers and the set of corresponding signals associated with each of the age-associated glycosylation biomarkers. In various embodiments, the set of age-associated glycosylation biomarkers comprises at least one of the age-associated glycosylation biomarkers listed in Table 23. Table 23 below lists a first group of peptide structures associated with age or a range of ages.

[1048] In various embodiments, method S2400 may optionally include, at step S2430, generating the correlation coefficient based on the predicted age and the chronological age for each sample of the cohort. In various embodiments, the correlation coefficient can be a Pearson correlation coefficient where the predicted age is a continuous variable and the chronological age is another continuous variable. In various embodiments, the Pearson correlation coefficient (r_{xy}) can be determined via an equation:

$${r}_{xy} = \frac{{\sum }_{i = 1}^{n} ( {x}_{i} - \overline{x} ) ( {y}_{i} - \overline{y} )}{\sqrt{{\sum }_{i = 1}^{n} {( {x}_{i} - \overline{x} )}^{2}} \sqrt{{\sum }_{i = 1}^{n} {( {y}_{i} - \overline{y} )}^{2}}}$$

$$where n = a number of the samples in the cohort ,$$

$$i = an index number for each of the samples ,$$

$${x}_{i} = a chronological age for sample i ,$$

$$\overline{x} = a mean chronological age ,$$

$${y}_{i} = a predicted age for sample i , and$$

$$\overline{y} = a mean predicted age .$$

[1049] In various embodiments, the model can include multiplying the corresponding signal associated with age-associated glycosylation biomarkers and a respective coefficient for each sample of the cohort to form a plurality of products. In various embodiments, the model can also include summing together the plurality of products to form a summation, and then adding the summation and the intercept to form an output value, wherein the output value is proportional to the predicted age for the sample. In various embodiments, the model can include an equation:

$$O V = {\sum }_{i = 1}^{i = 20} [ ( {Signal}_{SEQ ID No : i} ) \times ( {Coefficient}_{SEQ ID No : i} ) ] + Intercept$$

$$where O V = an output value ,$$

$$i = an index number for each of the age - associated glycosylation biomarkers ,$$

$${Signal}_{SEQ ID No : i} = a corresponding signal associated with the age - associated glycosylation biomarker i , and$$

$${Coefficient}_{SEQ ID No : i} = a coefficient associated with the age - associated glycosylation biomarker i .$$

[1050] In various embodiments, each sample of the cohort has a disease condition, where the disease condition selected from the group consisting of non-small cell lung cancer, breast cancer, pancreatic cancer, colorectal cancer, and nonalcoholic steatohepatitis (NASH). In various embodiments, each sample of the cohort has either a disease condition or a healthy condition, where the disease condition selected from the group consisting of non-small cell lung cancer, breast cancer, pancreatic cancer, colorectal cancer, and nonalcoholic steatohepatitis (NASH). In various embodiments, each sample of the cohort has either a single disease condition or a healthy condition where the disease conditions include non-small cell lung cancer, breast cancer, pancreatic cancer, colorectal cancer, and nonalcoholic steatohepatitis (NASH). In various embodiments, at least one of the age-associated glycosylation biomarkers includes a glycopeptide structure defined by a peptide sequence and a glycan structure linked to the peptide sequence at a linking site of the peptide sequence, as identified in Table 23, with the peptide sequence being one of SEQ ID NOS: 163-174 as defined in Table 25A and 25B.

[1051] In various embodiments, method S2400 can optionally include receiving the peptide structure data for each sample of the cohort from a mass spectrometer. In various embodiments, the peptide structure data include at least one of a raw abundance, an adjusted raw abundance, a peptide concentration, a glycopeptide concentration, or a normalized concentration. In various embodiments, the peptide structure data comprise normalized concentration data, wherein the normalized concentration data is a function of at least one of peptide abundance data, corresponding internal standard abundance data, a spike-in concentration value, and a dilution factor. In various embodiments, the peptide structure data are generated using multiple reaction monitoring mass spectrometry (MR n-MS).

[1052] In various embodiments, method S2400 can optionally include creating a sample from the biological sample, and preparing the sample using reduction, alkylation, and enzymatic digestion to form a prepared sample that includes a set of peptide structures. In various embodiments, method S2400 can optionally include generating the peptide structure data from the prepared sample using multiple reaction monitoring mass spectrometry (MR-MS).

[1053] In various embodiments, the set of age-associated glycosylation biomarkers can include at least three of the age-associated glycosylation biomarkers listed in Table 23. In various embodiments, the set of age-associated glycosylation biomarkers can include at least five of the age-associated glycosylation biomarkers listed in Table 23.

[1054] Table 23 below lists a group of peptide structures associated with age or a range of ages. One or more features (e.g., relative abundance, concentration, site occupancy) of these peptide structures may be used in a supervised machine learning model described elsewhere herein to generate an age-related indicator.

TABLE 23
Peptide Structures Associated with Age or a Range of Ages

| | | | | | Linking | Linking | |
|---|---|---|---|---|---|---|---|
| | | | | | Site | Site | |
| | | | | | Position | Position | |
| | | | (Protein) | (Peptide) | within | within | Glycan |
| | PS-ID | | SEQ ID | SEQ ID | Protein | Peptide | Structure |
| PS-NAME | NO. | Protein Name | NO. | NO. | Sequence | Sequence | GL NO. |
| IC1 (352) - 5402 | 103 | Plasma protease C1 inhibitor | 153 | 163 | 352 | 9 | 5402 |
| IC1 (253) - 6513 | 104 | Plasma protease C1 inhibitor | 153 | 164 | 253 | 4 | 6513 |
| IGG1 (297) - 5410 | 105 | Immunoglobulin heavy constant gamma 1 | 154 | 165 | 297 | 5 | 5410 |
| IGA12 (144MC) - 4500 | 106 | Immunoglobulin heavy constant alpha 1 or 2 | 155 or 160 | 166 | 144 | 13 | 4500 |
| ZA2G (128) - 5402 | 107 | Zinc-alpha-2-glycoprotein | 156 | 167 | 128 | 8 | 5402 |
| IGG1 (297) - 3510 | 108 | Immunoglobulin heavy constant gamma 1 | 154 | 165 | 297 | 5 | 3510 |
| IGG2 (297) - 5510 | 109 | Immunoglobulin heavy constant gamma 2 | 157 | 168 | 297 | 5 | 5510 |
| IGG1 (297) - 5411 | 110 | Immunoglobulin heavy constant gamma 1 | 154 | 165 | 297 | 5 | 5411 |
| AGP12 (72MC) - 6503 | 111 | Alpha-1-acid glycoprotein 1&2 | 158 or 162 | 169 | 72 | 15 | 6503 |
| IGG1 (297) - 4510 | 112 | Immunoglobulin heavy constant gamma 1 | 154 | 165 | 297 | 5 | 4510 |
| IC1 (253) - 6503 | 113 | Plasma protease C1 inhibitor | 153 | 164 | 253 | 4 | 6503 |
| TRFE (630) - 5402 | 114 | Serotransferrin | 159 | 170 | 630 | 9 | 5402 |
| IGA2 (205) - 5511 | 115 | Immunoglobulin heavy constant alpha 2 | 160 | 171 | 205 | 6 | 5511 |
| AGP12 (72MC) - 7613 | 116 | Alpha-1-acid glycoprotein 1 or 2 | 158 or 162 | 169 | 72 | 15 | 7613 |
| AGP12 (72) - 7601 | 117 | Alpha-1-acid glycoprotein 1 or 2 | 158 or 162 | 172 | 72 | 15 | 7601 |
| IGA12 (144) - 5402 | 118 | Immunoglobulin heavy constant alpha 1 or 2 | 155 or 160 | 173 | 144 | 18 | 5402 |
| IGG1 (297) - 3410 | 119 | Immunoglobulin heavy constant gamma 1 | 154 | 165 | 297 | 5 | 3410 |
| IGM (209) - 5411_Z3 | 120 | Immunoglobulin heavy constant mu | 161 | 174 | 209 | 7 | 5411 |
| IGG1 (297) - 5412 | 121 | Immunoglobulin heavy constant gamma 1 | 154 | 165 | 297 | 5 | 5412 |
| IGG1 (297) - 3500 | 122 | Immunoglobulin heavy constant gamma 1 | 154 | 165 | 297 | 5 | 3500 |

[1055] Table 23 includes the Peptide Structure Identification Number (PS-ID NO.) that is a reference number for a particular peptide or glycopeptide. The Peptide Structure Name (PS-Name, e.g., IC1 (352)-5402), which is a reference code for the protein name (e.g., ICI), followed by the glycan linking site position in the protein (e.g., the number 352 that is within a parenthesis and represents a sequential amino acid position in protein IC1), and followed by the glycan structure GL number (e.g., the number 5402 that is preceded by a hyphen and represents a glycan composition Hex(5)HexNAc(4)Fuc(0)NeuAc(2)). The Protein Sequence ID No of Table 23 corresponds to the corresponding protein name, Unitprot ID, and amino acid sequence of Table 26. The Peptide Sequence ID No of Table 23 corresponds to the corresponding peptide sequence of Table 25A. The term Linking Site Pos. within Protein Sequence is a number that refers to the sequential position of an amino acid of the corresponding protein in which a glycan is attached. For the Glycan Linking Site Pos. within Protein Sequence, the amino acid position of the peptide sequence is defined by the sequentially numbered order of amino acids based on the Uniprot ID of the corresponding protein for the peptide sequence. The term Linking Site Pos. within Peptide Sequence is a number that refers to the sequential position of an amino acid of the corresponding peptide in which a glycan is attached. For the Glycan Linking Site Pos. in peptide Sequence, the amino acid position of the peptide sequence is defined by the sequentially numbered order of amino acids for the peptide sequence. The term Glycan Structure GL No. is a number that corresponds to a symbol structure and a composition of the glycan as indicated in Table 27.

[1056] In some embodiments, the term AGP12 represents that the glycopeptide is a fragment of either AGP1 or AGP2. In some embodiments, the term IGA12 represents that the glycopeptide is a fragment of either IGA1 or IGA2.

[1057] In some instances of the Peptide Structure (PS) NAME, subsequent to the prefix, there is a number noted with the notation MC that indicates that there was a missed cleavage at position in the peptide sequence as noted by the number. In some instances of the Peptide Structure (PS) NAME, there is a suffix NH₃LOSS to indicate a loss of a NH₃ group.

[1058] As illustrated in FIG. 29, method S2900 further includes, at step S2920, identifying a quality control issue associated with the annotated sex for the cohort based on an accuracy score based on the predicted sex and the annotated sex for each sample of the cohort. In various embodiments, the identifying the quality control issue associated with the annotated sex for the cohort is based on the accuracy score. In various embodiments, the quality control issue includes an error of mislabeled samples or an error from sample preparation. In various embodiments, the quality control issue includes a systemic measurement or an instrument error.

[1059] In various embodiments, the peptide structure data can include a set of sex-associated glycosylation biomarkers, and a set of corresponding signals associated with each of the sex-associated glycosylation biomarkers. In various embodiments, the set of corresponding signals is proportional to an amount of each of the sex-associated glycosylation biomarkers in the sample. In various embodiments, the model can be based on the set of sex-associated glycosylation biomarkers and the set of corresponding signals associated with each of the sex-associated glycosylation biomarkers. In various embodiments, the set of sex-associated glycosylation biomarkers comprises at least one of the sex-associated glycosylation biomarkers listed in Table 28. Table 28 below lists a group of peptide structures associated with sex.

[1060] In various embodiments, method S2900 may optionally include, at step S2930, generating the accuracy score based on the predicted sex and the annotated sex for each sample of the cohort.

[1061] In various embodiments, method S2900 may optionally include, at step S2940, generating a sensitivity score based on the predicted sex and the annotated sex for each sample of the cohort. The generated sensitivity score indicates a true positive rate when comparing the predicted sex and the annotated sex, in accordance with various embodiments. In various embodiments, the sensitivity score may be proportional to actual positive cases that are predicted as positive by the model. The sensitivity score may illustrate an overall performance of the model on the cohort of samples. A positive case occurs when the annotated sex is the same gender as the predicted sex.

[1062] In various embodiments, method S2900 may optionally include, at step S2950, generating a specificity score based on the predicted sex and the annotated sex for each sample of the cohort. The generated specificity score indicates a true negative rate when comparing the predicted sex and the annotated sex, in accordance with various embodiments. In various embodiments, the specificity score may be proportional to actual negative cases that are predicted as negative by the model. A negative case occurs when the annotated sex is not the same gender as the predicted sex. The specificity score may illustrate an overall performance of the model on the cohort of samples.

[1063] In various embodiments, each sample of the cohort has a disease condition, where the disease condition is selected from the group consisting of non-small cell lung cancer, breast cancer, pancreatic cancer, colorectal cancer, and nonalcoholic steatohepatitis (NASH). In various embodiments, each sample of the cohort has either a disease condition or a healthy condition, where the disease condition selected from the group consisting of non-small cell lung cancer, breast cancer, pancreatic cancer, colorectal cancer, and nonalcoholic steatohepatitis (NASH). In various embodiments, each sample of the cohort has either a single disease condition or a healthy condition where the disease conditions include non-small cell lung cancer, breast cancer, pancreatic cancer, colorectal cancer, and nonalcoholic steatohepatitis (NASH). In various embodiments, at least one of the sex-associated glycosylation biomarkers includes a glycopeptide structure defined by a peptide sequence and a glycan structure linked to the peptide sequence at a linking site of the peptide sequence, as identified in Table 28, with the peptide sequence being one of SEQ ID NOS: 183-196 as defined in Table 30A and 30B.

[1064] In various embodiments, method S2900 can optionally include receiving the peptide structure data for each sample of the cohort from a mass spectrometer. In various embodiments, the peptide structure data include at least one of a raw abundance, an adjusted raw abundance, a peptide concentration, a glycopeptide concentration, or a normalized concentration. In various embodiments, the peptide structure data comprise normalized concentration data, wherein the normalized concentration data is a function of at least one of peptide abundance data, corresponding internal standard abundance data, a spike-in concentration value, and a dilution factor. In various embodiments, the peptide structure data are generated using multiple reaction monitoring mass spectrometry (MRM-MS).

[1065] In various embodiments, method S2900 can optionally include creating a sample from the biological sample, and preparing the sample using reduction, alkylation, and enzymatic digestion to form a prepared sample that includes a set of peptide structures. In various embodiments, method S2900 can optionally include generating the peptide structure data from the prepared sample using multiple reaction monitoring mass spectrometry (MRM-MS).

[1066] In various embodiments, the set of sex-associated glycosylation biomarkers can include at least three of the sex-associated glycosylation biomarkers listed in Table 28. In various embodiments, the set of sex-associated glycosylation biomarkers can include at least five of the sex-associated glycosylation biomarkers listed in Table 28. One or more features (e.g., relative abundance, concentration, site occupancy) of these peptide structures may be used in a supervised machine learning model described elsewhere herein to generate an age-related indicator.

[1067] Table 28: Peptide Structures Associated with Sex

TABLE 28
Peptide Structures Associated with Sex

| | | | | | | Linking | Linking | |
|---|---|---|---|---|---|---|---|---|
| | | | | | | Site | Site | |
| | | | | | | Position | Position | |
| | | | | (Protein) | (Peptide) | within | within | Glycan |
| | PS-ID | | Uniprot | SEQ ID | SEQ ID | Protein | Peptide | Structure |
| PS-NAME | NO. | Protein Name | ID | NO. | NO. | Sequence | Sequence | GL NO. |
| IGJ (71) - 5401 | 123 | Immunoglobulin J chain | P01591 | 175 | 183 | 71 | 2 | 5401 |
| SHBG (380) - 5402 | 124 | Sex hormone-binding globulin | P04278 | 176 | 184 | 380 | 8 | 5402 |
| AACT (106) - 7614 | 125 | Alpha-1-antichymotrypsin | P01011 | 177 | 185 | 106 | 2 | 7614 |
| CO6 (324) - 5402 | 126 | Complement component C6 | P13671 | 178 | 186 | 324 | 3 | 5402 |
| CERU (138) - 5412 | 127 | Ceruloplasmin | P00450 | 179 | 187 | 138 | 10 | 5412 |
| IGJ (71MC) - 5412 | 128 | Immunoglobulin J chain | P01591 | 175 | 188 | 71 | 10 | 5412 |
| AACT (106) - 7604 | 129 | Alpha-1-antichymotrypsin | P01011 | 177 | 185 | 106 | 2 | 7604 |
| IGJ (71MC) - 5401 | 130 | Immunoglobulin J chain | P01591 | 175 | 188 | 71 | 10 | 5401 |
| AACT (106) - 7624 | 131 | Alpha-1-antichymotrypsin | P01011 | 177 | 185 | 106 | 2 | 7624 |
| AACT (106) - 6513 | 132 | Alpha-1-antichymotrypsin | P01011 | 177 | 185 | 106 | 2 | 6513 |
| KNG1 (169) - 5402 | 133 | Kininogen-1 | P01042 | 180 | 189 | 169 | 8 | 5402 |
| IGJ (71) - 5412 | 134 | Immunoglobulin J chain | P01591 | 175 | 183 | 71 | 2 | 5412 |
| KNG1 (169) - 6503 | 135 | Kininogen-1 | P01042 | 180 | 189 | 169 | 8 | 6503 |
| CERU (358) - | 136 | Ceruloplasmin | P00450 | 179 | 190 | n/a | n/a | NONGLYCOSYLATED |
| NONGLYCOSYLATED | | | | | | | | |
| CERU (358) - 5412 | 137 | Ceruloplasmin | P00450 | 179 | 190 | 358 | 13 | 5412 |
| KLKB1 (453) - 5402 | 138 | Plasma Kallikrein | P03952 | 181 | 191 | 453 | 7 | 5402 |
| CERU (138) - 5402 | 139 | Ceruloplasmin | P00450 | 179 | 187 | 138 | 10 | 5402 |
| ANGT (47) - 5401 | 140 | Angiotensinogen | P01019 | 182 | 192 | 47 | 12 | 5401 |
| ANGT (47) - 5402 | 141 | Angiotensinogen | P01019 | 182 | 192 | 47 | 12 | 5402 |
| KLKB1 (308) - 5401 | 142 | Plasma Kallikrein | P03952 | 181 | 193 | 308 | 13 | 5401 |
| CERU (138) - 6513 | 143 | Ceruloplasmin | P00450 | 179 | 187 | 138 | 10 | 6513 |
| IGJ (71MC) - 5411 | 144 | Immunoglobulin J chain | P01591 | 175 | 188 | 71 | 10 | 5411 |
| IGJ (71MC) - | 145 | Immunoglobulin J chain | P01591 | 175 | 188 | n/a | n/a | NONGLYCOSYLATED |
| NONGLYCOSYLATED | | | | | | | | |
| CERU (138) - 6503 | 146 | Ceruloplasmin | P00450 | 179 | 187 | 138 | 10 | 6503 |
| AACT (106) - 6503 | 147 | Alpha-1-antichymotrypsin | P01011 | 177 | 185 | 106 | 2 | 6503 |
| KLKB1 (453) - | 148 | Plasma Kallikrein | P03952 | 181 | 191 | n/a | n/a | NONGLYCOSYLATED |
| NONGLYCOSYLATED | | | | | | | | |
| CO6 (855) - 5402 | 149 | Complement component C6 | P13671 | 178 | 194 | 855 | 4 | 5402 |
| CERU (358) - 5402 | 150 | Ceruloplasmin | P00450 | 179 | 190 | 358 | 13 | 5402 |
| KLKB1 (494MC) - 5402 | 151 | Plasma Kallikrein | P03952 | 181 | 195 | 494 | 6 | 5402 |
| KLKB1 (494) - 5410 | 152 | Plasma Kallikrein | P03952 | 181 | 196 | 494 | 6 | 5410 |
| KLKB1 (494) - 5401 | 153 | Plasma Kallikrein | P03952 | 181 | 196 | 494 | 6 | 5401 |
| KLKB1 (494) - 5400 | 154 | Plasma Kallikrein | P03952 | 181 | 196 | 494 | 6 | 5400 |
| KLKB1 (494) - 6503 | 155 | Plasma Kallikrein | P03952 | 181 | 196 | 494 | 6 | 6503 |
| AACT (106) - 5402 | 156 | Alpha-1-antichymotrypsin | P01011 | 177 | 185 | 106 | 2 | 5402 |
| AACT (106) - 7603 | 157 | Alpha-1-antichymotrypsin | P01011 | 177 | 185 | 106 | 2 | 7603 |
| KLKB1 (494MC) - 6503 | 158 | Plasma Kallikrein | P03952 | 181 | 195 | 494 | 6 | 5502 |
| IGJ (71) - 5411 | 159 | Immunoglobulin J chain | P01591 | 175 | 183 | 71 | 2 | 5411 |
| KLKB1 (308) - 5402 | 160 | Plasma Kallikrein | P03952 | 181 | 193 | 308 | 13 | 5402 |
| KLKB1 (494) - 5402 | 161 | Plasma Kallikrein | P03952 | 181 | 196 | 494 | 6 | 5402 |
| CERU (138) - 6502 | 162 | Ceruloplasmin | P00450 | 179 | 187 | 138 | 10 | 6502 |
| KLKB1 (494MC) - 5401 | 163 | Plasma Kallikrein | P03952 | 181 | 195 | 494 | 6 | 5400 |
| KNG1 (169) - 6513 | 164 | Kininogen-1 | P01042 | 180 | 189 | 169 | 8 | 6513 |

[1068] Table 28 includes the Peptide Structure Identification Number (PS-ID NO.) that is a reference number for a particular peptide or glycopeptide. The Peptide Structure Name (PS-Name, e.g., IGJ (71)-5401), which is a reference code for the protein name (e.g., IGJ), followed by the glycan linking site position in the protein (e.g., the number 71 that is within a parenthesis and represents a sequential amino acid position in protein IGJ), and followed by the glycan structure GL number (e.g., the number 5402 that is preceded by a hyphen and represents a glycan composition Hex(5)HexNAc(4)Fuc(0)NeuAc(1)). The Protein Sequence ID No of Table 28 corresponds to the corresponding protein name, Unitprot ID, and amino acid sequence of Table 31. The Peptide Sequence ID No of Table 1 corresponds to the corresponding peptide sequence of Table 30A. The term Linking Site Pos. within Protein Sequence is a number that refers to the sequential position of an amino acid of the corresponding protein in which a glycan is attached. For the Glycan Linking Site Pos. within Protein Sequence, the amino acid position of the peptide sequence is defined by the sequentially numbered order of amino acids based on the Uniprot ID of the corresponding protein for the peptide sequence. The term Linking Site Pos. within Peptide Sequence is a number that refers to the sequential position of an amino acid of the corresponding peptide in which a glycan is attached. For the Glycan Linking Site Pos. in peptide Sequence, the amino acid position of the peptide sequence is defined by the sequentially numbered order of amino acids for the peptide sequence. The term Glycan Structure GL No. is a number that corresponds to a symbol structure and a composition of the glycan as indicated in Table 32.

[1069] In some embodiments, the term AGP12 represents that the glycopeptide is a fragment of either AGP1 or AGP2. In some embodiments, the term IGA12 represents that the glycopeptide is a fragment of either IGA1 or IGA2.

[1070] In some instances of the Peptide Structure (PS) NAME, subsequent to the prefix, there is a number noted with the notation MC that indicates that there was a missed cleavage at position in the peptide sequence as noted by the number. In some instances of the Peptide Structure (PS) NAME, there is a suffix NH₃LOSS to indicate a loss of a NH₃ group.

### XIV.B. Training the Model for Quality Control of Samples

[1071] FIG. 25 is a flowchart of method S2500 of generating a model to predict an age of a patient, in accordance with various embodiments. Method S2500 may be implemented using, for example, at least a portion of workflow 100 as described in FIGS. 1, 2, and/or analysis system 300 as described in FIG. 3. In some embodiments, method S2500 may be one example of an implementation for training the model used in the method S2400 in FIG. 24.

[1072] As illustrated in FIG. 25, method S2500 includes, at step S2510, receiving peptide structure data for each sample of a cohort, wherein each sample has a chronological age, wherein the peptide structure data for each sample of the cohort include a set of glycopeptide groups, wherein each glycopeptide of the glycopeptide group has a same peptide sequence, and wherein each glycopeptide of the glycopeptide group has a different attached glycan at a same specific amino acid residue. At step S2520, method S2500 further includes determining, via principal component analysis (PCA), such as PCA 318, one or more PCA features, such as PCA features 319, for each glycopeptide group of the set of glycopeptide groups.

[1073] Method S2500 further includes, at step S2530, performing linear regression with the PCA feature and the chronological age for each sample, and at step S2540, selecting a set of the one or more PCA features with statistically significant values below a threshold value. In various embodiments, the statistically significant values for each of the PCA features is an output of the performed linear regression. In various embodiments, each of the PCA features are associated with a glycopeptide group. In various embodiments, each of the glycopeptide groups may include one or more glycopeptides where the one or more glycopeptides are glycoforms.

[1074] As illustrated in FIG. 25, method S2500 may optionally include, at step S2550, training, via one or more processors, at least one machine learning model using the one or more glycopeptides for each glycopeptide group of the selected set of the one or more PCA features and the chronological age for each sample. In various embodiments, training data can be used for training the supervised machine learning model. The training data can include a plurality of peptide structure profiles for a plurality of subjects. In various embodiments, method S2500 may optionally include, at step S2560, testing the at least one trained machine learning model using another cohort of samples to generate predicted age values and comparing the predicted age values with the chronological age values of the another cohort of samples to validate the at least one trained machine learning model. The trained machine learning model can include ElasticNet. In some embodiments, the machine learning model can include a binary classification model. Some binary classification models can include logistical regression models. Some logistical regression models can include LASSO regression models.

[1075] In various embodiments, the machine learning model is a supervised machine learning model that is trained to determine weight coefficients for a panel of peptide structures such that a first portion of the weight coefficients for a first portion of the panel of peptide structures are non-zero and a second portion of the weight coefficients for a second portion of the panel of peptide structures are zero (or, alternatively, substantially close to zero so as to not be statistically significant).

[1076] For example, the machine learning model may be a LASSO regression model that selects the peptide structures identified in Table 23. The markers used for training of the LASSO regression model may, in one or more embodiments, additionally include one or more other peptide structure markers.

[1077] In various embodiments of method S2500, each sample of the cohort has a disease condition, the disease condition selected from the group consisting of non-small cell lung cancer, breast cancer, pancreatic cancer, colorectal cancer, and nonalcoholic steatohepatitis (NASH). In various embodiments of method S2500, each sample of the cohort has either a disease condition or a healthy condition, the disease condition selected from the group consisting of non-small cell lung cancer, breast cancer, pancreatic cancer, colorectal cancer, and nonalcoholic steatohepatitis (NASH). In various embodiments of method S2500, each sample of the cohort has either a single disease condition or a healthy condition.

[1078] FIG. 30 is a flowchart of method S3000 of generating a model to predict a sex of a patient, in accordance with various embodiments. Method S3000 may be implemented using, for example, at least a portion of workflow 100 as described in FIGS. 1, 2, and/or analysis system 300 as described in FIG. 3. In some embodiments, method S3000 may be one example of an implementation for training the model used in the method S2900 in FIG. 29.

[1079] As illustrated in FIG. 30, method S3000 includes, at step S3010, receiving peptide structure data for each sample of a cohort, wherein each sample has an annotated sex, wherein the peptide structure data for each sample of the cohort include a set of glycopeptide groups, wherein each glycopeptide of the glycopeptide group has a same peptide sequence, and wherein each glycopeptide of the glycopeptide group has a different attached glycan at a same specific amino acid residue. At step S3020, method S3000 further includes determining, via principal component analysis (PCA), such as PCA 318, one or more PCA features, such as PCA features 319, for each glycopeptide group of the set of glycopeptide groups.

[1080] Method S3000 further includes, at step S3030, performing linear regression with the PCA feature and the annotated sex for each sample, and at step S3040, selecting a set of the one or more PCA features with statistically significant values below a threshold value. In various embodiments, the statistically significant values for each of the PCA features is an output of the performed linear regression. In various embodiments, each of the PCA features are associated with a glycopeptide group. In various embodiments, each of the glycopeptide groups may include one or more glycopeptides where the one or more glycopeptides are glycoforms.

[1081] As illustrated in FIG. 30, method S3000 may optionally include, at step S3050, training, via one or more processors, at least one machine learning model using the one or more glycopeptides for each glycopeptide group of the selected set of the one or more PCA features and the annotated sex for each sample. In various embodiments, training data can be used for training the supervised machine learning model. The training data can include a plurality of peptide structure profiles for a plurality of subjects. In various embodiments, method S3000 may optionally include, at step S3060, testing the at least one trained machine learning model using another cohort of samples to generate predicted sex values and comparing the predicted sex values with the annotated sex values of the another cohort of samples to validate the at least one trained machine learning model. The trained machine learning model can include ElasticNet. In some embodiments, the machine learning model can include a binary classification model. Some binary classification models can include logistical regression models. Some logistical regression models can include LASSO regression models.

[1082] In various embodiments, the machine learning model is a supervised machine learning model that is trained to determine weight coefficients for a panel of peptide structures such that a first portion of the weight coefficients for a first portion of the panel of peptide structures are non-zero and a second portion of the weight coefficients for a second portion of the panel of peptide structures are zero (or, alternatively, substantially close to zero so as to not be statistically significant).

[1083] For example, the machine learning model may be an elastic regression, logistical regression, or LASSO regression model that selects the peptide structures identified in Table 28. The markers used for training one of the regression models may, in one or more embodiments, additionally include one or more other peptide structure markers.

[1084] In various embodiments of method S3000, each sample of the cohort has a disease condition, the disease condition selected from the group consisting of non-small cell lung cancer, breast cancer, pancreatic cancer, colorectal cancer, and nonalcoholic steatohepatitis (NASH). In various embodiments of method S3000, each sample of the cohort has either a disease condition or a healthy condition, the disease condition selected from the group consisting of non-small cell lung cancer, breast cancer, pancreatic cancer, colorectal cancer, and nonalcoholic steatohepatitis (NASH). In various embodiments of method S3000, each sample of the cohort has either a single disease condition or a healthy condition.

### XIV.C. Performing Quality Control of Samples

[1] FIG. 26 is a flowchart of method S2600 of performing quality control of samples, in accordance with various embodiments. FIG. 31 is a flowchart of method S3100 of performing quality control of samples, in accordance with various embodiments

### I. Peptide Structure and Product Ion Compositions, Kits and Reagents

[1085] Aspects of the disclosure include compositions comprising one or more of the peptide structures listed in Table 23. In some embodiments, a composition comprises a plurality of the peptide structures listed in Table 23. In some embodiments, a composition comprises 1, 2, 3, 4, 5, 6, 7, 8, 9, 10, 11, 12, 13, 14, 15, 16, 17, 18, 19, or all 20 of the peptide structures listed in Table 23. In some embodiments, a composition comprises a peptide structure having an amino acid sequence with at least 80% sequence identity, such as, for example, at least 81%, 82%, 83%, 84%, 85%, 86%, 87%, 88%, 89%, 90%, 91%, 92%, 93%, 94%, 95%, 96%, 97%, 98%, 99%, or 100% sequence identity to any one of SEQ ID NOs: 163-174, listed in Table 23. In various embodiments, the peptide structures listed in Table 23 are in accordance with the peptide sequences listed in Table 25A and the glycan symbol structures and glycan composition of Table 27.

[1086] Aspects of the disclosure include compositions comprising one or more precursor ions having a defined charge and/or defined mass-to-charge (m/z) ratio, as listed in Table 25. Aspects of the disclosure include compositions comprising one or more product ions having a defined mass-to-charge (m/z) ratio, which product ions are produced by converting a peptide structure described herein (e.g., a peptide structure listed in Table 23) into a gas phase ion in a mass spectrometry system. Conversion of the peptide structure into a gas phase ion can take place using any of a variety of techniques, including, but not limited to, matrix assisted laser desorption ionization (MALDI); electron ionization (EI); electrospray ionization (ESI); atmospheric pressure chemical ionization (APCI); and/or atmospheric pressure photo ionization (APPI).

[1087] Aspects of the disclosure include compositions comprising one or more product ions produced from one or more of the peptide structures described herein (e.g., a peptide structure listed in Table 23). In some embodiments, a composition comprises a set of the product ions listed in Table 24, having an m/z ratio selected from the list provided for each peptide structure in Table 23 or Table 24.

[1088] In some embodiments, a composition comprises at least one of peptide structures PS-103, PS-104, PS-105, PS-106, PS-107, PS-108, PS-109. PS-110, PS-111, PS-112, PS-113, PS-114, PS-115, PS-116, PS-117, PS-118, PS-119, PS-120, PS-121, and PS-122 identified in Table 23. In one or more embodiments, a composition comprises at least 1, at least 2, at least 3, at least 4, at least 5, at least 6, at least 7, at least 8, at least 9, at least 10, at least 11, at least 12, at least 13, at least 14, at least 15, at least 16, at least 17, at least 18, at least 19, or all 20 of the peptide structures PS-103, PS-104, PS-105, PS-106, PS-107, PS-108, PS-109. PS-110, PS-111, PS-112, PS-113, PS-114, PS-115, PS-116, PS-117, PS-118, PS-119, PS-120, PS-121, and PS-122 in Table 23.

[1089] In some embodiments, a composition comprises a peptide structure or a product ion. The peptide structure or product ion comprises an amino acid sequence having at least 90% sequence identity to any one of SEQ ID NOS: 163-174, as identified in Table 25A, corresponding to peptide structures PS-103, PS-104, PS-105, PS-106, PS-107, PS-108, PS-109. PS-110, PS-111, PS-112, PS-113, PS-114, PS-115, PS-116, PS-117, PS-118, PS-119, PS-120, PS-121, and PS-122 in Table 23.

[1090] In some embodiments, the product ion is selected as one from a group consisting of product ions identified in Table 24, including product ions falling within an identified m/z range of the m/z ratio identified in Table 24 and characterized as having a precursor ion having an m/z ratio within an identified m/z range of the m/z ratio identified in Table 24. A first range for the product ion m/z ratio may be ±0.5. A second range for the product ion m/z ratio may be ±0.8. A third range for the product ion m/z ratio may be ±1.0. A first range for the precursor ion m/z ratio may be ±1.0; a second range for the precursor ion m/z ratio may be (+1.5). Thus, a composition may include a product ion having an m/z ratio that falls within at least one of the first range (+0.5), the second range (+0.8), or the third range (1.0) of the product ion m/z ratio identified in Table 25, and characterized as having a precursor ion having an m/z ratio that falls within at least one of first range (+0.5), a second range (1.0), or a third range (1.0 of the precursor ion m/z ratio identified in Table 24.

TABLE 24
Mass Spectrometry-Related Characteristics for the Peptide
Structures associated with Age or a Range of Ages

| | | | | | | | Colli- |
|---|---|---|---|---|---|---|---|
| | Mono- | | | | 2nd | | sion |
| PS- | isotopic | Pre- | | Prod- | Prod- | | En- |
| ID | mass | cursor | Precurs | uct | uct | RT | ergy- |
| NO. | (g/mol) | m/z | charge | m/z | m/z | (Min) | Volt |
| 103 | 4517.13034 | 1130.8 | 4 | 204.1 | 1258.7 | 39.4 | 35 |
| 104 | 5107.14298 | 1278.3 | 4 | 204.1 | 1152.6 | 35.7 | 40 |
| 105 | 2957.14418 | 987.1 | 3 | 366.1 | 1392.6 | 7.8 | 24 |
| 106 | 4019.838876 | 1341.6 | 3 | 204.1 | 1281.2 | 41.66 | 25 |
| 107 | 3342.25967 | 1115.1 | 3 | 366.1 | 1341.6 | 10.6 | 30 |
| 108 | 2836.117908 | 946.5 | 3 | 204.1 | 1392.6 | 8.1 | 15 |
| 109 | 3128.23372 | 1043.8 | 3 | 366.1 | n/a | 12.8 | 25 |
| 110 | 3248.23959 | 1084.1 | 3 | 366.1 | 1392.6 | 8.2 | 27 |
| 111 | 5755.448988 | 1152.7 | 5 | 366.1 | 1550.3 | 41 | 28 |
| 112 | 2998.170728 | 1000.7 | 3 | 204.1 | 1392.6 | 8 | 15 |
| 113 | 4961.085074 | 1241.8 | 4 | 204.1 | 1152.6 | 35.8 | 35 |
| 114 | 4718.889192 | 1181.1 | 4 | 366.1 | n/a | 32.7 | 29 |
| 115 | 3220.36373 | 1074.5 | 3 | 366.1 | n/a | 13.1 | 24 |
| 116 | 6266.639082 | 1568.4 | 4 | 366.1 | 366.1 | 40.9 | 30 |
| 117 | 4562.887832 | 1142.2 | 4 | 366.1 | n/a | 35.9 | 20 |
| 118 | 5167.363312 | 1292.9 | 4 | 366.1 | n/a | 41.5 | 32 |
| 119 | 2633.03854 | 879 | 3 | 204.1 | 1392.6 | 7.9 | 21 |
| 120 | 4397.80301 | 1467 | 3 | 366.1 | n/a | 25.3 | 30 |
| 121 | 3539.335 | 1181.1 | 3 | 204.1 | n/a | 8.6 | 40 |
| 122 | 2690.060002 | 898 | 3 | 1392.6 | n/a | 8.1 | 25 |

[1091] Table 25A defines the peptide sequences for SEQ ID NOS: 163-174 from Table 23. Table 26 further identifies a corresponding protein SEQ ID NO. for each peptide sequence.

TABLE 25A
Peptide SEQ ID NOS

| Prot | | Pept |
|---|---|---|
| SEQ | | SEQ ID |
| ID NO. | Peptide.sequence | NO. |
| 153 | VGQLQLSHNLSLVILVPQNLK | 163 |
| 153 | VLSNNSDANLELINTWVAK | 164 |
| 154 | EEQYNSTYR | 165 |
| 155 | PALEDLLLGSEANLTCTLTGLR | 166 |
| 156 | FGCEIENNR | 167 |
| 154 | EEQYNSTYR | 165 |
| 157 | EEQFNSTFR | 168 |
| 154 | EEQYNSTYR | 165 |
| 158 | SVQEIQATFFYFTPNKTEDTIFLR | 169 |
| 154 | EEQYNSTYR | 165 |
| 153 | VLSNNSDANLELINTWVAK | 164 |
| 159 | QQQHLFGSNVTDCSGNFCLFR | 170 |
| 160 | TPLTANITK | 171 |
| 158 | SVQEIQATFFYFTPNKTEDTIFLR | 169 |
| 158 | SVQEIQATFFYFTPNK | 172 |
| 155 | LSLHRPALEDLLLGSEANLTCTLTGLR | 173 |
| 154 | EEQYNSTYR | 165 |
| 161 | GLTFQQNASSMCVPDQDTAIR | 174 |
| 154 | EEQYNSTYR | 165 |
| 154 | EEQYNSTYR | 165 |

[1092] Table 25B provides an indication of particular markers and includes the starting position of the peptide sequence within the protein sequence and the end position of the peptide sequence within the protein sequence.

TABLE 25B
Markers and Protein Positions

| PS-ID | | | Start | End |
|---|---|---|---|---|
| NO. | PS-NAME | Peptide.sequence | position | position |
| 103 | IC1 (352)-5402 | VGQLQLSHNLSLVILVPQNLK | 344 | 364 |
| 104 | IC1 (253)-6513 | VLSNNSDANLELINTWVAK | 250 | 268 |
| 105 | IGG1 (297)-5410 | EEQYNSTYR | 293 | 301 |
| 106 | IGA12 (144MC)-4500 | PALEDLLLGSEANLTCTLTGLR | 132 | 153 |
| 107 | ZA2G (128)-5402 | FGCEIENNR | 121 | 129 |
| 108 | IGG1 (297)-3510 | EEQYNSTYR | 293 | 301 |
| 109 | IGG2 (297)-5510 | EEQFNSTFR | 293 | 301 |
| 110 | IGG1 (297)-5411 | EEQYNSTYR | 293 | 301 |
| 111 | AGP12 (72MC)-6503 | SVQEIQATFFYFTPNKTEDTIFLR | 58 | 81 |
| 112 | IGG1 (297)-4510 | EEQYNSTYR | 293 | 301 |
| 113 | IC1 (253)-6503 | VLSNNSDANLELINTWVAK | 250 | 268 |
| 114 | TRFE (630)-5402 | QQQHLFGSNVTDCSGNFCLFR | 622 | 642 |
| 115 | IGA2 (205)-5511 | TPLTANITK | 200 | 208 |
| 116 | AGP12 (72MC)-7613 | SVQEIQATFFYFTPNKTEDTIFLR | 58 | 81 |
| 117 | AGP12 (72)-7601 | SVQEIQATFFYFTPNK | 58 | 73 |
| 118 | IGA12 (144)-5402 | LSLHRPALEDLLLGSEANLTCTLTGLR | 127 | 153 |
| 119 | IGG1 (297)-3410 | EEQYNSTYR | 293 | 301 |
| 120 | IGM (209)-5411_Z3 | GLTFQQNASSMCVPDQDTAIR | 203 | 223 |
| 121 | IGG1 (297)-5412 | EEQYNSTYR | 293 | 301 |
| 122 | IGG1 (297)-3500 | EEQYNSTYR | 293 | 301 |

[1093] Table 26 identifies the proteins of SEQ ID NOS: 153-161 from Table 23. Table 26 identifies a corresponding protein abbreviation, protein name, and amino acid sequence for each of protein SEQ ID NOS: 153-161. Further, Table 26 identifies a corresponding Uniprot ID for each of protein SEQ ID NOS: 153-161.

TABLE 26
Protein SEQ ID NOS

| | | | Prot | |
|---|---|---|---|---|
| | | | SEQ | |
| Protein | Protein | Uniprot | ID | |
| Abbrev. | Name | ID | NO | Protein Sequence |
| IC1 | Plasma | P05155 | 153 | MASRLTLLTLLLLLLAGDRASSNPNATSSSSQDPESLQ |
| | protease C1 | | | DRGEGKVATTVISKMLFVEPILEVSSLPTTNSTTNSAT |
| | inhibitor | | | KITANTTDEPTTQPTTEPTTQPTIQPTQPTTQLPTDSPT |
| | | | | QPTTGSFCPGPVTLCSDLESHSTEAVLGDALVDFSLKL |
| | | | | YHAFSAMKKVETNMAFSPFSIASLLTQVLLGAGENTK |
| | | | | TNLESILSYPKDFTCVHQALKGFTTKGVTSVSQIFHSP |
| | | | | DLAIRDTFVNASRTLYSSSPRVLSNNSDANLELINTWV |
| | | | | AKNTNNKISRLLDSLPSDTRLVLLNAIYLSAKWKTTFD |
| | | | | PKKTRMEPFHFKNSVIKVPMMNSKKYPVAHFIDQTLK |
| | | | | AKVGQLQLSHNLSLVILVPQNLKHRLEDMEQALSPSV |
| | | | | FKAIMEKLEMSKFQPTLLTLPRIKVTTSQDMLSIMEKL |
| | | | | EFFDFSYDLNLCGLTEDPDLQVSAMQHQTVLELTETG |
| | | | | VEAAAASAISVARTLLVFEVQQPFLFVLWDQQHKFPV |
| | | | | FMGRVYDPRA |
| IGG1 | Immunoglobulin | P01857 | 154 | ASTKGPSVFPLAPSSKSTSGGTAALGCLVKDYFPEPVT |
| | heavy | | | VSWNSGALTSGVHTFPAVLQSSGLYSLSSVVTVPSSSL |
| | constant | | | GTQTYICNVNHKPSNTKVDKKVEPKSCDKTHTCPPCP |
| | gamma 1 | | | APELLGGPSVFLFPPKPKDTLMISRTPEVTCVVVDVSH |
| | | | | EDPEVKFNWYVDGVEVHNAKTKPREEQYNSTYRVVS |
| | | | | VLTVLHQDWLNGKEYKCKVSNKALPAPIEKTISKAKG |
| | | | | QPREPQVYTLPPSRDELTKNQVSLTCLVKGFYPSDIAV |
| | | | | EWESNGQPENNYKTTPPVLDSDGSFFLYSKLTVDKSR |
| | | | | WQQGNVFSCSVMHEALHNHYTQKSLSLSPGK |
| IGA1 | Immunoglobulin | P01876 | 155 | ASPTSPKVFPLSLCSTQPDGNVVIACLVQGFFPQEPLSV |
| | heavy | | | TWSESGQGVTARNFPPSQDASGDLYTTSSQLTLPATQ |
| | constant | | | CLAGKSVTCHVKHYTNPSQDVTVPCPVPSTPPTPSPST |
| | alpha 1 | | | PPTPSPSCCHPRLSLHRPALEDLLLGSEANLTCTLTGLR |
| | | | | DASGVTFTWTPSSGKSAVQGPPERDLCGCYSVSSVLP |
| | | | | GCAEPWNHGKTFTCTAAYPESKTPLTATLSKSGNTFR |
| | | | | PEVHLLPPPSEELALNELVTLTCLARGFSPKDVLVRWL |
| | | | | QGSQELPREKYLTWASRQEPSQGTTTFAVTSILRVAA |
| | | | | EDWKKGDTFSCMVGHEALPLAFTQKTIDRLAGKPTH |
| | | | | VNVSVVMAEVDGTCY |
| ZA2G | Zinc-alpha- | P25311 | 156 | MVRMVPVLLSLLLLLGPAVPQENQDGRYSLTYIYTGL |
| | 2- | | | SKHVEDVPAFQALGSLNDLQFFRYNSKDRKSQPMGL |
| | glycoprotein | | | WRQVEGMEDWKQDSQLQKAREDIFMETLKDIVEYY |
| | | | | NDSNGSHVLQGRFGCEIENNRSSGAFWKYYYDGKDY |
| | | | | IEFNKEIPAWVPFDPAAQITKQKWEAEPVYVQRAKAY |
| | | | | LEEECPATLRKYLKYSKNILDRQDPPSVVVTSHQAPG |
| | | | | EKKKLKCLAYDFYPGKIDVHWTRAGEVQEPELRGDV |
| | | | | LHNGNGTYQSWVVVAVPPQDTAPYSCHVQHSSLAQP |
| | | | | LVVPWEAS |
| IGG2 | Immunoglobulin | P01859 | 157 | ASTKGPSVFPLAPCSRSTSESTAALGCLVKDYFPEPVT |
| | heavy | | | VSWNSGALTSGVHTFPAVLQSSGLYSLSSVVTVPSSNF |
| | constant | | | GTQTYTCNVDHKPSNTKVDKTVERKCCVECPPCPAPP |
| | gamma 2 | | | VAGPSVFLFPPKPKDTLMISRTPEVTCVVVDVSHEDPE |
| | | | | VQFNWYVDGVEVHNAKTKPREEQFNSTFRVVSVLTV |
| | | | | VHQDWLNGKEYKCKVSNKGLPAPIEKTISKTKGQPRE |
| | | | | PQVYTLPPSREEMTKNQVSLTCLVKGFYPSDISVEWES |
| | | | | NGQPENNYKTTPPMLDSDGSFFLYSKLTVDKSRWQQ |
| | | | | GNVFSCSVMHEALHNHYTQKSLSLSPGK |
| AGP1 | Alpha-1- | P02763 | 158 | MALSWVLTVLSLLPLLEAQIPLCANLVPVPITNATLDR |
| | acid | | | ITGKWFYIASAFRNEEYNKSVQEIQATFFYFTPNKTED |
| | glycoprotein | | | TIFLREYQTRQDQCIYNTTYLNVQRENGTISRYVGGQE |
| | 1 | | | HFAHLLILRDTKTYMLAFDVNDEKNWGLSVYADKPE |
| | | | | TTKEQLGEFYEALDCLRIPKSDVVYTDWKKDKCEPLE |
| | | | | KQHEKERKQEEGES |
| TRFE | Sero- | P02787 | 159 | MRLAVGALLVCAVLGLCLAVPDKTVRWCAVSEHEA |
| | transferrin | | | TKCQSFRDHMKSVIPSDGPSVACVKKASYLDCIRAIA |
| | | | | ANEADAVTLDAGLVYDAYLAPNNLKPVVAEFYGSKE |
| | | | | DPQTFYYAVAVVKKDSGFQMNQLRGKKSCHTGLGRS |
| | | | | AGWNIPIGLLYCDLPEPRKPLEKAVANFFSGSCAPCAD |
| | | | | GTDFPQLCQLCPGCGCSTLNQYFGYSGAFKCLKDGA |
| | | | | GDVAFVKHSTIFENLANKADRDQYELLCLDNTRKPV |
| | | | | DEYKDCHLAQVPSHTVVARSMGGKEDLIWELLNQAQ |
| | | | | EHFGKDKSKEFQLFSSPHGKDLLFKDSAHGFLKVPPR |
| | | | | MDAKMYLGYEYVTAIRNLREGTCPEAPTDECKPVKW |
| | | | | CALSHHERLKCDEWSVNSVGKIECVSAETTEDCIAKI |
| | | | | MNGEADAMSLDGGFVYIAGKCGLVPVLAENYNKSD |
| | | | | NCEDTPEAGYFAIAVVKKSASDLTWDNLKGKKSCHT |
| | | | | AVGRTAGWNIPMGLLYNKINHCRFDEFFSEGCAPGSK |
| | | | | KDSSLCKLCMGSGLNLCEPNNKEGYYGYTGAFRCLV |
| | | | | EKGDVAFVKHQTVPQNTGGKNPDPWAKNLNEKDYE |
| | | | | LLCLDGTRKPVEEYANCHLARAPNHAVVTRKDKEAC |
| | | | | VHKILRQQQHLFGSNVTDCSGNFCLFRSETKDLLFRD |
| | | | | DTVCLAKLHDRNTYEKYLGEEYVKAVGNLRKCSTSS |
| | | | | LLEACTFRRP |
| IGA2 | Immunoglobulin | P01877 | 160 | ASPTSPKVFPLSLDSTPQDGNVVVACLVQGFFPQEPLS |
| | heavy | | | VTWSESGQNVTARNFPPSQDASGDLYTTSSQLTLPAT |
| | constant | | | QCPDGKSVTCHVKHYTNSSQDVTVPCRVPPPPPCCHP |
| | alpha 2 | | | RLSLHRPALEDLLLGSEANLTCTLTGLRDASGATFTW |
| | | | | TPSSGKSAVQGPPERDLCGCYSVSSVLPGCAQPWNHG |
| | | | | ETFTCTAAHPELKTPLTANITKSGNTFRPEVHLLPPPSE |
| | | | | ELALNELVTLTCLARGFSPKDVLVRWLQGSQELPREK |
| | | | | YLTWASRQEPSQGTTTYAVTSILRVAAEDWKKGETFS |
| | | | | CMVGHEALPLAFTQKTIDRMAGKPTHINVSVVMAEA |
| | | | | DGTCY |
| IGM | Immunoglobulin | P01871 | 161 | GSASAPTLFPLVSCENSPSDTSSVAVGCLAQDFLPDSIT |
| | heavy | | | FSWKYKNNSDISSTRGFPSVLRGGKYAATSQVLLPSK |
| | constant | | | DVMQGTDEHVVCKVQHPNGNKEKNVPLPVIAELPPK |
| | mu | | | VSVFVPPRDGFFGNPRKSKLICQATGFSPRQIQVSWLR |
| | | | | EGKQVGSGVTTDQVQAEAKESGPTTYKVTSTLTIKES |
| | | | | DWLGQSMFTCRVDHRGLTFQQNASSMCVPDQDTAIR |
| | | | | VFAIPPSFASIFLTKSTKLTCLVTDLTTYDSVTISWTRQ |
| | | | | NGEAVKTHTNISESHPNATFSAVGEASICEDDWNSGE |
| | | | | RFTCTVTHTDLPSPLKQTISRPKGVALHRPDVYLLPPA |
| | | | | REQLNLRESATITCLVTGFSPADVFVQWMQRGQPLSP |
| | | | | EKYVTSAPMPEPQAPGRYFAHSILTVSEEEWNTGETY |
| | | | | TCVVAHEALPNRVTERTVDKSTGKPTLYNVSLVMSD |
| | | | | TAGTCY |
| AGP2 | Alpha-1- | P19652 | 162 | MALSWVLTVLSLLPLLEAQIPLCANLVPVPITNATLDR |
| | acid | | | ITGKWFYIASAFRNEEYNKSVQEIQATFFYFTPNKTED |
| | glycoprotein | | | TIFLREYQTRQNQCFYNSSYLNVQRENGTVSRYEGGR |
| | 2 | | | EHVAHLLFLRDTKTLMFGSYLDDEKNWGLSFYADKP |
| | | | | ETTKEQLGEFYEALDCLCIPRSDVMYTDWKKDKCEPL |
| | | | | EKQHEKERKQEEGES |

[1094] Table 27 identifies and defines the glycan structures included in Table 23, all of which are N-glycans. Table 27 identifies a coded representation of the composition for each glycan structure included in Table 23. As used herein, the 4-digit GL NO. is a designation that represents the number of hexoses, the number of HexNAcs, the number of Fucoses, and the number of Neuraminic Acids. Table 27 illustrates the symbol structure and composition of detected glycan moieties that correspond to glycopeptides of Table 23 based on the Glycan GL NO. The term Symbol Structure illustrates a geometric linking structure of the carbohydrates where the bottommost carbohydrate such as N-acetylglucosamine is bound to the designated amino acid for an N-linked glycan and the rightmost carbohydrate such as N-acetylgalactosamine is bound to the designated amino acid for an O-linked glycan. For reference, N-linked glycans have a glycan attached to the amino acid asparagine and O-linked glycans have a glycan attached to either a serine or a threonine.

[1095] The term Composition refers to the number of various classes of carbohydrates that make up the glycan. The quantity for each class of carbohydrate is depicted as a number in parenthesis to the right of an abbreviation that corresponds to the class of the carbohydrate. The abbreviations for these classes are Hex, HexNAc, Fuc, and NeuAc that respectively correspond to hexose, N-acetylhexosamine, fucose, and N-acetylneuraminic acid. It should be noted that hexose sugars include glucose, galactose, and mannose; and N-acetylhexosamine sugars includes N-acetylglucosamine, N-acetylgalactosamine, and N-acetylmannosamine. In various embodiments, the terms Neu5Ac, NeuAc, and N-acetylneuraminic acid may be referred to as sialic acid.

[1096] Referring back to Tables 5, for some entries, there are two symbol structures provided for one Glycan Structure GL NO such as, for example, Glycan Structure GL NO 4500. Thus, the identify of a peptide that references a Glycan Structure GL NO that has two symbol structures could be one of two possibilities based on the MRM of the LC-MS analysis. In some instances, a bracket symbol is used as part of the Symbol Structure (e.g., 7601) to indicate that the precise bonding linkage is not exactly known, but that the linking line segment is attached to one of the plurality of adjacent carbohydrates immediately adjacent to the bracket.

TABLE 27
Glycan structure GL NO, symbol structure, and composition

| Glycan | | | |
|---|---|---|---|
| Structure | Symbol | Glycan | Glycan_{—} |
| GL NO. | Structure | Composition | MW |
| 7601 | [symbol] | Hex(7)HexNAc(6)Fuc(0)NeuAc(1) | 2643.941358 |
| 6503 | [symbol] | Hex(6)HexNAc(5)Fuc(0)NeuAc(3) | 2860.99999 |
| 7613 | [symbol] | Hex(7)HexNAc(6)Fuc(1)NeuAc(3) | 3372.190084 |
| 6513 | [symbol] | Hex(6)HexNAc(5)Fuc(1)NeuAc(3) | 3007.057896 |
| 5402 | [symbol] | Hex(5)HexNAc(4)Fuc(0)NeuAc(2) | 2204.772392 |
| 4500 | [symbol] | Hex(4)HexNAc(5)Fuc(0)NeuAc(0) | 1825.66094 |
| 5511 | [symbol] | Hex(5)HexNAc(5)Fuc(1)NeuAc(1) | 2262.814256 |
| 3410 | [symbol] | Hex(3)HexNAc(4)Fuc(1)NeuAc(0) | 1444.533838 |
| 3500 | [symbol] | Hex(3)HexNAc(5)Fuc(0)NeuAc(0) | 1501.5553 |
| 3510 | [symbol] | Hex(3)HexNAc(5)Fuc(1)NeuAc(0) | 1647.613206 |
| 4510 | [symbol] | Hex(4)HexNAc(5)Fuc(1)NeuAc(0) | 1809.666026 |
| 5410 | [symbol] | Hex(5)HexNAc(4)Fuc(1)NeuAc(0) | 1768.639478 |
| 5411 | [symbol] | Hex(5)HexNAc(4)Fuc(1)NeuAc(1) | 2059.734888 |
| 5412 | [symbol] | Hex(5)HexNAc(4)Fuc(1)NeuAc(2) | 2350.830298 |
| 5510 | [symbol] | Hex(5)HexNAc(5)Fuc(1)NeuAc(0) | 1971.718846 |

Legend for Table 27:
● Glc [symbol]
Gal [symbol]
Man [symbol]
Fuc [symbol]
Neu5Ac
▪ GlcNAc [symbol]
GalNAc [symbol]
ManNAc

[1097] The identity of the various monosaccharides is illustrated by the Legend section located at the end of Table 27. The abbreviations of the Legend are Glc that represents glucose and is indicated by a dark circle, Gal that represents galactose and is indicated by an open circle, Man that represents mannose and is indicated by a circle with intermediate grey shading, Fuc that represents fucose and is indicated by a dark triangle, Neu5Ac that represents N-acetylneuraminic acid and is indicated by a dark diamond, GlcNAc that represents N-acetylglucosamine and is indicated by a dark square, GalNAc that represents N-acetylgalactosamine and is indicated by an open square, and ManNAc that represents N-acetylmannosamine and is indicated by a square with intermediate grey shading.

[1098] Aspects of the disclosure include kits comprising one or more compositions, each comprising one or more peptide structures of the disclosure that can be used as assay standards, and instructions for use. Kits in accordance with one or more embodiments described herein may include a label indicating the intended use of the contents of the kit. The term “label” as used herein with respect to a kit includes any writing, or recorded material supplied on or with a kit, or that otherwise accompanies a kit.

[1099] The peptide structures and the transitions produced therefrom, as described herein, may be useful as quality control compositions and data with respect to a group of samples. A transition includes a precursor ion and at least one product ion grouping. As encompassed herein, the peptide structures in Table 23, as well as their corresponding precursor ion and product ion groupings (these ions having defined m/z ratios or m/z ratios that fall within the m/z ranges identified herein) in Table 24, can be used in mass spectrometry-based analyses as positive controls for performance quality and/or accuracy.

[1100] Aspects of the disclosure include methods for analyzing one or more peptide structures, as described herein. In some embodiments, the methods involve processing a sample from a subject, such as a patient, to generate a prepared sample that can be inputted into a mass spectrometry system (e.g., a reaction monitoring mass spectrometry system). In certain embodiments, processing the sample can comprise performing one or more of: a denaturation procedure, a reduction procedure, an alkylation procedure, and a digestion procedure. The denaturation and reduction procedures may be implemented in a manner similar to, for example, denaturation and reduction 202 in FIG. 2. The alkylation procedure may be implemented in a manner similar to, for example, alkylation procedure 204 in FIG. 2. The digestion procedure may be implemented in a manner similar to, for example, digestion procedure 206 in FIG. 2.

[1101] In some embodiments, the methods for analyzing one or more peptide structures involve detecting a set of product ions generated by a reaction monitoring mass spectrometry system in which one or more product ions may correspond to each of the one or more peptide structures that have been inputted into the mass spectrometry system. As described herein, each peptide structure can be converted into a set of product ions having a defined m/z ratio, as provided in Table 24 or an m/z ratio within an identified m/z ratio as provided in Table 24. In some embodiments, the methods involve generating quantification (e.g., abundance) data for the one or more product ions detected using the reaction monitoring mass spectrometry system.

[1102] In some embodiments, the methods further comprise generating a diagnosis output using the quantification data and a model that has been trained using supervised or unsupervised machine learning. In certain embodiments, the reaction monitoring mass spectrometry system may include multiple/selected reaction monitoring mass spectrometry (MRM/SRM-MS) to detect the one or more product ions and generate the quantification data.

### II. Peptide Structure and Product Ion Compositions, Kits and Reagents

[1103] Aspects of the disclosure include compositions comprising one or more of the peptide structures listed in Table 28. In some embodiments, a composition comprises a plurality of the peptide structures listed in Table 28. In some embodiments, a composition comprises 1, 2, 3, 4, 5, 6, 7, 8, 9, 10, 11, 12, 13, 14, 15, 16, 17, 18, 19, 20, 21, 22, 23, 24, 25, 26, 27, 28, 29, 30, 31, 32, 33, 34, 35, 36, 37, 38, 39, 40, 41, or all 42 of the peptide structures listed in Table 28. In some embodiments, a composition comprises a peptide structure having an amino acid sequence with at least 80% sequence identity, such as, for example, at least 81%, 82%, 83%, 84%, 85%, 86%, 87%, 88%, 89%, 90%, 91%, 92%, 93%, 94%, 95%, 96%, 97%, 98%, 99%, or 100% sequence identity to any one of SEQ ID NOs: 183-196, listed in Table 28. In various embodiments, the peptide structures listed in Table 28 are in accordance with the peptide sequences listed in Table 30A and the glycan symbol structures and glycan composition of Table 32.

[1104] Aspects of the disclosure include compositions comprising one or more precursor ions having a defined charge and/or defined mass-to-charge (m/z) ratio, as listed in Table 30. Aspects of the disclosure include compositions comprising one or more product ions having a defined mass-to-charge (m/z) ratio, which product ions are produced by converting a peptide structure described herein (e.g., a peptide structure listed in Table 28) into a gas phase ion in a mass spectrometry system. Conversion of the peptide structure into a gas phase ion can take place using any of a variety of techniques, including, but not limited to, matrix assisted laser desorption ionization (MALDI); electron ionization (EI); electrospray ionization (ESI); atmospheric pressure chemical ionization (APCI); and/or atmospheric pressure photo ionization (APPI).

[1105] Aspects of the disclosure include compositions comprising one or more product ions produced from one or more of the peptide structures described herein (e.g., a peptide structure listed in Table 28). In some embodiments, a composition comprises a set of the product ions listed in Table 29, having an m/z ratio selected from the list provided for each peptide structure in Table 28 or Table 29.

[1106] In some embodiments, a composition comprises at least one of peptide structures PS-123, PS-124, PS-125, PS-126, PS-127, PS-128, PS-129, PS-130, PS-131, PS-132, PS-133, PS-134, PS-135, PS-136, PS-137, PS-138, PS-139, PS-140, PS-141, PS-142, PS-143, PS-144, PS-145, PS-146, PS-147, PS-148, PS-149, PS-150, PS-151, PS-152, PS-153, PS-154, PS-155, PS-156, PS-157, PS-158, PS-159, PS-160, PS-161, PS-162, PS-163, and PS-164 identified in Table 28. In one or more embodiments, a composition comprises at least 1, at least 2, at least 3, at least 4, at least 5, at least 6, at least 7, at least 8, at least 9, at least 10, at least 11, at least 12, at least 13, at least 14, at least 15, at least 16, at least 17, at least 18, at least 19, at least 20, at least 21, at least 22, at least 23, at least 24, at least 25, at least 26, at least 27, at least 28, at least 29, at least 30, at least 31, at least 32, at least 33, at least 34, at least 35, at least 36, at least 37, at least 38, at least 39, at least 40, at least 41, or all 42 of the peptide structures PS-123, PS-124, PS-125, PS-126, PS-127, PS-128, PS-129, PS-130, PS-131, PS-132, PS-133, PS-134, PS-135, PS-136, PS-137, PS-138, PS-139, PS-140, PS-141, PS-142, PS-143, PS-144, PS-145, PS-146, PS-147, PS-148, PS-149, PS-150, PS-151, PS-152, PS-153, PS-154, PS-155, PS-156, PS-157, PS-158, PS-159, PS-160, PS-161, PS-162, PS-163, and PS-164 in Table 28.

[1107] In one or more embodiments, a composition comprises at least 1, at least 2, at least 3, at least 4, at least 5, at least 6, at least 7, at least 8, at least 9, at least 10, at least 11, at least 12, at least 13, at least 14, at least 15, at least 16, at least 17, at least 18, at least 19, at least 20, at least 21, at least 22, at least 23, at least 24, at least 25, at least 26, at least 27, at least 28, at least 29, at least 30, at least 31, at least 32, at least 33, at least 34, at least 35, at least 36, at least 37, at least 38, at least 39, at least 40, at least 41, or all 42 of the precursor and product ions in Table 29.

[1108] In some embodiments, a composition comprises a peptide structure or a product ion. The peptide structure or product ion comprises an amino acid sequence having at least 90% sequence identity to any one of SEQ ID NOS: 183-196, as identified in Table 30A, corresponding to peptide structures PS-123, PS-124, PS-125, PS-126, PS-127, PS-128, PS-129, PS-130, PS-131, PS-132, PS-133, PS-134, PS-135, PS-136, PS-137, PS-138, PS-139, PS-140, PS-141, PS-142, PS-143, PS-144, PS-145, PS-146, PS-147, PS-148, PS-149, PS-150, PS-151, PS-152, PS-153, PS-154, PS-155, PS-156, PS-157, PS-158, PS-159, PS-160, PS-161, PS-162, PS-163, and PS-164 in Table 28.

[1109] In some embodiments, the product ion is selected as one from a group consisting of product ions identified in Table 29, including product ions falling within an identified m/z range of the m/z ratio identified in Table 29 and characterized as having a precursor ion having an m/z ratio within an identified m/z range of the m/z ratio identified in Table 29. A first range for the product ion m/z ratio may be ±0.5. A second range for the product ion m/z ratio may be ±0.8. A third range for the product ion m/z ratio may be ±1.0. A first range for the precursor ion m/z ratio may be ±1.0; a second range for the precursor ion m/z ratio may be (+1.5). Thus, a composition may include a product ion having an m/z ratio that falls within at least one of the first range (±0.5), the second range (±0.8), or the third range (±1.0) of the product ion m/z ratio identified in Table 30, and characterized as having a precursor ion having an m/z ratio that falls within at least one of first range (±0.5), a second range (±1.0), or a third range (±1.0 of the precursor ion m/z ratio identified in Table 29.

[1110] Table 29 shows various parameters associated with the identification of the peptide and glycopeptides using LC and MRM-MS. The retention time (RT) represents the amount of time in minutes for the peptide elute from the chromatography column. The collision energy represents the energy applied to the peptide for creating fragments (i.e., product ions) such as, for example, in the 2^{nd} quadrupole of the triple quadrupole MS. The precursor m/z represents a ratio value associated with an ionized form having a precursor charge for the peptide or glycopeptide. The precursor ion is associated with a first product ion having a m/z ratio that was formed from a collision and with a second product ion having a m/z ratio that was formed from a collision.

TABLE 29
Mass Spectrometry-Related Characteristics for Sex-Associated Peptide Structures

| | Monoisotopic | | Collision | | | | 2nd |
|---|---|---|---|---|---|---|---|
| PS-ID | mass | RT | Energy- | Precursor | Precursor | Product | Product |
| NO. | (g/mol) | (min) | Volt | m/z | charge | m/z | m/z |
| 123 | 3141.28648 | 15.3 | 26 | 1048.1 | 3 | 366.1 | n/a |
| 124 | 3247.31309 | 16.9 | 30 | 1083.8 | 3 | 204.1 | n/a |
| 125 | 6062.47241 | 38.3 | 35 | 1214.1 | 5 | 274.1 | n/a |
| 126 | 3026.23708 | 16.2 | 25 | 1009.8 | 3 | 366.1 | n/a |
| 127 | 4242.66392 | 16.5 | 25 | 1062.2 | 4 | 366.1 | 1048.5 |
| 128 | 4498.00011 | 27.3 | 28 | 1125.6 | 4 | 366.1 | n/a |
| 129 | 5916.4145 | 38.3 | 30 | 1184.9 | 5 | 274.1 | n/a |
| 130 | 4060.8468 | 26.6 | 27 | 1016.2 | 4 | 366.1 | n/a |
| 131 | 6208.53032 | 38.3 | 35 | 1243.3 | 5 | 274.1 | n/a |
| 132 | 5406.24481 | 37.8 | 30 | 1082.6 | 5 | 274.1 | n/a |
| 133 | 4825.02159 | 30.7 | 36 | 1208 | 4 | 366.1 | n/a |
| 134 | 3578.4398 | 15.7 | 25 | 1193.8 | 3 | 366.1 | n/a |
| 135 | 5481.24918 | 31.6 | 20 | 1097.8 | 5 | 274.1 | n/a |
| 136 | 1638.782388 | 31.38 | 25 | 820.9 | 2 | 1052.5 | 678.3 |
| 137 | 3989.61269 | 30 | 20 | 998.9 | 4 | 366.1 | n/a |
| 138 | 3640.56461 | 35.7 | 20 | 911.4 | 4 | 274.1 | 820.4 |
| 139 | 4096.60602 | 16.7 | 20 | 1025.7 | 4 | 274.1 | 1048.5 |
| 140 | 4447.95094 | 23.9 | 15 | 891 | 5 | 366.1 | 913.5 |
| 141 | 4739.04635 | 25.3 | 18 | 949.2 | 5 | 274.1 | 913.5 |
| 142 | 3896.67588 | 37 | 20 | 975.7 | 4 | 366.1 | n/a |
| 143 | 4898.89152 | 17.1 | 30 | 1226.2 | 4 | 366.1 | 1048.5 |
| 144 | 4206.9047 | 26.4 | 26 | 1052.8 | 4 | 366.1 | n/a |
| 145 | 2147.169814 | 26.825 | 20 | 717.2 | 3 | 912 | 608.3 |
| 146 | 4752.83361 | 17.2 | 25 | 1189.7 | 4 | 274.1 | n/a |
| 147 | 5260.18691 | 37.9 | 30 | 1053.4 | 5 | 274.1 | n/a |
| 148 | 1435.79221 | 35.295 | 20 | 719.3 | 2 | 1160.7 | 903.5 |
| 149 | 2940.14866 | 4.1 | 27 | 981.4 | 3 | 366.1 | n/a |
| 150 | 3843.55478 | 30 | 20 | 962.4 | 4 | 366.1 | n/a |
| 151 | 3655.51799 | 27 | 35 | 1220.2 | 4 | 366.1 | 827.9 |
| 152 | 4014.81635 | 30.4 | 20 | 1004.7 | 4 | 366.1 | n/a |
| 153 | 4159.85386 | 31.8 | 25 | 1041.5 | 4 | 366.1 | n/a |
| 154 | 3868.75845 | 30.7 | 30 | 968.2 | 4 | 366.1 | n/a |
| 155 | 5107.17687 | 33.5 | 38 | 1277.8 | 4 | 366.1 | n/a |
| 156 | 4603.95931 | 37.2 | 30 | 922.2 | 5 | 204.1 | n/a |
| 157 | 5625.31909 | 37.7 | 30 | 1126.7 | 5 | 274.1 | 1302.1 |
| 158 | 4311.74559 | 27.2 | 38 | 1438.9 | 3 | 366.1 | 827.9 |
| 159 | 3287.34439 | 15.3 | 25 | 1096.8 | 3 | 366.1 | 1431.7 |
| 160 | 4187.77129 | 37.8 | 18 | 1048.4 | 4 | 1094 | n/a |
| 161 | 4450.94927 | 32.9 | 35 | 1114.2 | 4 | 204.1 | 1225.6 |
| 162 | 4461.7382 | 16.5 | 34 | 1117.2 | 4 | 366.1 | n/a |
| 163 | 3364.42258 | 26 | 25 | 1123.1 | 3 | 366.1 | 827.9 |
| 164 | 5627.30709 | 31.5 | 35 | 1408.6 | 4 | 274.1 | n/a |

[1111] Table 30A defines the peptide sequences for SEQ ID NOS: 183-196 from Table 28. Table 31 further identifies a corresponding protein SEQ TD NO. for each peptide sequence.

TABLE 30A
Peptide SEQ ID NOS

| (Pro- | | (Pep- |
|---|---|---|
| tein) | | tide) |
| SEQ | | SEQ |
| ID | | ID |
| NO. | Peptide.sequence | NO. |
| 175 | ENISDPTSPLR | 183 |
| 176 | LDVDQALNR | 184 |
| 177 | FNLTETSEAEIHQSFQHLLR | 185 |
| 178 | VLNFTTK | 186 |
| 179 | EHEGAIYPDNTTDFQR | 187 |
| 175 | IIVPLNNRENISDPTSPLR | 188 |
| 177 | FNLTETSEAEIHQSFQHLLR | 185 |
| 175 | IIVPLNNRENISDPTSPLR | 188 |
| 177 | FNLTETSEAEIHQSFQHLLR | 185 |
| 177 | FNLTETSEAEIHQSFQHLLR | 185 |
| 180 | HGIQYFNNNTQHSSLFMLNEVK | 189 |
| 175 | ENISDPTSPLR | 183 |
| 180 | HGIQYFNNNTQHSSLFMLNEVK | 189 |
| 179 | AGLQAFFQVQECNK | 190 |
| 179 | AGLQAFFQVQECNK | 190 |
| 181 | IYSGILNLSDITK | 191 |
| 179 | EHEGAIYPDNTTDFQR | 187 |
| 182 | VYIHPFHLVIHNESTCEQLAK | 192 |
| 182 | VYIHPFHLVIHNESTCEQLAK | 192 |
| 181 | IYPGVDFGGEELNVTFVK | 193 |
| 179 | EHEGAIYPDNTTDFQR | 187 |
| 175 | IIVPLNNRENISDPTSPLR | 188 |
| 175 | IIVPLNNRENISDPTSPLR | 188 |
| 179 | EHEGAIYPDNTTDFQR | 187 |
| 177 | FNLTETSEAEIHQSFQHLLR | 185 |
| 181 | IYSGILNLSDITK | 191 |
| 178 | LSSNSTK | 194 |
| 179 | AGLQAFFQVQECNK | 190 |
| 181 | LQAPLNYTEFQK | 195 |
| 181 | LQAPLNYTEFQKPICLPSK | 196 |
| 181 | LQAPLNYTEFQKPICLPSK | 196 |
| 181 | LQAPLNYTEFQKPICLPSK | 196 |
| 181 | LQAPLNYTEFQKPICLPSK | 196 |
| 177 | FNLTETSEAEIHQSFQHLLR | 185 |
| 177 | FNLTETSEAEIHQSFQHLLR | 185 |
| 181 | LQAPLNYTEFQK | 195 |
| 175 | ENISDPTSPLR | 183 |
| 181 | IYPGVDFGGEELNVTFVK | 193 |
| 181 | LQAPLNYTEFQKPICLPSK | 196 |
| 179 | EHEGAIYPDNTTDFQR | 187 |
| 181 | LQAPLNYTEFQK | 195 |
| 180 | HGIQYFNNNTQHSSLFMLNEVK | 189 |

[11] Table 30B provides an indication of particular markers and includes the starting position of the peptide sequence within the protein sequence and the end position of the peptide sequence within the protein sequence.

TABLE 30B
Markers and Protein Positions

| PS- | | | Start | End |
|---|---|---|---|---|
| ID | | Peptide. | posi- | posi- |
| NO. | PS-NAME | sequence | tion | tion |
| 123 | IGJ | ENISDPTSP | 70 | 80 |
| | (71)- | LR | | |
| | 5401 | | | |
| 124 | SHBG | LDVDQALNR | 373 | 381 |
| | (380)- | | | |
| | 5402 | | | |
| 125 | AACT | FNLTETSEA | 105 | 124 |
| | (106)- | EIHQSFQHL | | |
| | 7614 | LR | | |
| 126 | CO6 | VLNFTTK | 322 | 328 |
| | (324)- | | | |
| | 5402 | | | |
| 127 | CERU | EHEGAIYPD | 129 | 144 |
| | (138)- | NTTDFQR | | |
| | 5412 | | | |
| 128 | IGJ | IIVPLNNRE | 62 | 80 |
| | (71MC)- | NISDPTSPL | | |
| | 5412 | R | | |
| 129 | AACT | FNLTETSEA | 105 | 124 |
| | (106)- | EIHQSFQHL | | |
| | 7604 | LR | | |
| 130 | IGJ | IIVPLNNRE | 62 | 80 |
| | (71MC)- | NISDPTSPL | | |
| | 5401 | R | | |
| 131 | AACT | FNLTETSEA | 105 | 124 |
| | (106)- | EIHQSFQHL | | |
| | 7624 | LR | | |
| 132 | AACT | FNLTETSEA | 105 | 124 |
| | (106)- | EIHQSFQHL | | |
| | 6513 | LR | | |
| 133 | KNG1 | HGIQYFNNNT | 162 | 183 |
| | (169)- | QHSSLFMLNE | | |
| | 5402 | VK | | |
| 134 | IGJ | ENISDPTSPL | 70 | 80 |
| | (71)- | R | | |
| | 5412 | | | |
| 135 | KNG1 | HGIQYFNNNT | 162 | 183 |
| | (169)- | QHSSLFMLNE | | |
| | 6503 | VK | | |
| 136 | CERU | AGLQAFFQVQ | 346 | 359 |
| | (358)- | ECNK | | |
| | NON- | | | |
| | GLYCOS. | | | |
| 137 | CERU | AGLQAFFQVQ | 346 | 359 |
| | (358)- | ECNK | | |
| | 5412 | | | |
| 138 | KLKB1 | IYSGILNLSD | 447 | 459 |
| | (453)- | ITK | | |
| | 5402 | | | |
| 139 | CERU | EHEGAIYPDN | 129 | 144 |
| | (138)- | TTDFQR | | |
| | 5402 | | | |
| 140 | ANGT | VYIHPFHLVI | 36 | 56 |
| | (47)- | HNESTCEQLA | | |
| | 5401 | K | | |
| 141 | ANGT | VYIHPFHLVI | 36 | 56 |
| | (47)- | HNESTCEQLA | | |
| | 5402 | K | | |
| 142 | KLKB1 | IYPGVDFGGE | 296 | 313 |
| | (308)- | ELNVTFVK | | |
| | 5401 | | | |
| 143 | CERU | EHEGAIYPDN | 129 | 144 |
| | (138)- | TTDFQR | | |
| | 6513 | | | |
| 144 | IGJ | IIVPLNNREN | 62 | 80 |
| | (71MC)- | ISDPTSPLR | | |
| | 5411 | | | |
| 145 | IGJ | IIVPLNNREN | 61 | 80 |
| | (71MC)- | ISDPTSPLR | | |
| | NON- | | | |
| | GLYCOS. | | | |
| 146 | CERU | EHEGAIYPDN | 129 | 144 |
| | (138)- | TTDFQR | | |
| | 6503 | | | |
| 147 | AACT | FNLTETSEAE | 105 | 124 |
| | (106)- | IHQSFQHLLR | | |
| | 6503 | | | |
| 148 | KLKB1 | IYSGILNLSD | 447 | 459 |
| | (453)- | ITK | | |
| | NON- | | | |
| | GLYCOS. | | | |
| 149 | CO6 | LSSNSTK | 852 | 858 |
| | (855)- | | | |
| | 5402 | | | |
| 150 | CERU | AGLQAFFQVQ | 346 | 359 |
| | (358)- | ECNK | | |
| | 5402 | | | |
| 151 | KLKB1 | LQAPLNYTEF | 489 | 500 |
| | (494MC)- | QK | | |
| | 5402 | | | |
| 152 | KLKB1 | LQAPLNYTEF | 489 | 507 |
| | (494)- | QKPICLPSK | | |
| | 5410 | | | |
| 153 | KLKB1 | LQAPLNYTEF | 489 | 507 |
| | (494)- | QKPICLPSK | | |
| | 5401 | | | |
| 154 | KLKB1 | LQAPLNYTEF | 489 | 507 |
| | (494)- | QKPICLPSK | | |
| | 5400 | | | |
| 155 | KLKB1 | LQAPLNYTEF | 489 | 507 |
| | (494)- | QKPICLPSK | | |
| | 6503 | | | |
| 156 | AACT | FNLTETSEAE | 105 | 124 |
| | (106)- | IHQSFQHLLR | | |
| | 5402 | | | |
| 157 | AACT | FNLTETSEAE | 105 | 124 |
| | (106)- | IHQSFQHLLR | | |
| | 7603 | | | |
| 158 | KLKB1 | LQAPLNYTEF | 489 | 500 |
| | (494MC)- | QK | | |
| | 6503 | | | |
| 159 | IGJ | ENISDPTSPL | 70 | 80 |
| | (71)- | R | | |
| | 5411 | | | |
| 160 | KLKB1 | IYPGVDFGGE | 296 | 313 |
| | (308)- | ELNVTFVK | | |
| | 5402 | | | |
| 161 | KLKB1 | LQAPLNYTEF | 489 | 507 |
| | (494)- | QKPICLPSK | | |
| | 5402 | | | |
| 162 | CERU | EHEGAIYPDN | 129 | 144 |
| | (138)- | TTDFQR | | |
| | 6502 | | | |
| 163 | KLKB1 | LQAPLNYTEF | 489 | 500 |
| | (494MC)- | QK | | |
| | 5401 | | | |
| 164 | KNG1 | HGIQYFNNNT | 162 | 183 |
| | (169)- | QHSSLFMLNE | | |
| | 6513 | VK | | |

[1112] Table 31 identifies the proteins of SEQ TD NOS: 175-182 from Table 28. Table 31 identifies a corresponding protein abbreviation, protein name, and amino acid sequence for each of protein SEQ TD NOS: 175-182. Further, Table 31 identifies a corresponding Uniprot ID for each of protein SEQ TD NOS: 175-182.

TABLE 31
Protein SEQ ID NOS

| | | | Prot | |
|---|---|---|---|---|
| Pro- | Pro- | Uni- | SEQ | |
| tein | tein | prot | ID | |
| Abbrev | Name | ID | NO. | Protein Sequence |
| IGJ | Immuno- | P01591 | 175 | MKNHLLFWGVLAVFIKA |
| | globulin | | | VHVKAQEDERIVLVDNK |
| | J chain | | | CKCARITSRIIRSSEDP |
| | | | | NEDIVERNIRIIVPLNN |
| | | | | RENISDPTSPLRTRFVY |
| | | | | HLSDLCKKCDPTEVELD |
| | | | | NQIVTATQSNICDEDSA |
| | | | | TETCYTYDRNKCYTAVV |
| | | | | PLVYGGETKMVETALTP |
| | | | | DACYPD |
| SHBG | Sex | P04278 | 176 | MESRGPLATSRLLLLLL |
| | hormone- | | | LLLLRHTRQGWALRPVL |
| | binding | | | PTQSAHDPPAVHLSNGP |
| | globulin | | | GQEPIAVMTFDLTKITK |
| | | | | TSSSFEVRTWDPEGVIF |
| | | | | YGDTNPKDDWFMLGLRD |
| | | | | GRPEIQLHNHWAQLTVG |
| | | | | AGPRLDDGRWHQVEVKM |
| | | | | EGDSVLLEVDGEEVLRL |
| | | | | RQVSGPLTSKRHPIMRI |
| | | | | ALGGLLFPASNLRLPLV |
| | | | | PALDGCLRRDSWLDKQA |
| | | | | EISASAPTSLRSCDVES |
| | | | | NPGIFLPPGTQAEFNLR |
| | | | | DIPQPHAEPWAFSLDLG |
| | | | | LKQAAGSGHLLALGTPE |
| | | | | NPSWLSLHLQDQKVVLS |
| | | | | SGSGPGLDLPLVLGLPL |
| | | | | QLKLSMSRVVLSQGSKM |
| | | | | KALALPPLGLAPLLNLW |
| | | | | AKPQGRLFLGALPGEDS |
| | | | | STSFCLNGLWAQGQRLD |
| | | | | VDQALNRSHEIWTHSCP |
| | | | | QSPGNGTDASH |
| AACT | Alpha- | P01011 | 177 | MERMLPLLALGLLAAGF |
| | 1-anti- | | | CPAVLCHPNSPLDEENL |
| | chymo- | | | TQENQDRGTHVDLGLAS |
| | trypsin | | | ANVDFAFSLYKQLVLKA |
| | | | | PDKNVIFSPLSISTALA |
| | | | | FLSLGAHNTTLTEILKG |
| | | | | LKFNLTETSEAEIHQSF |
| | | | | QHLLRTLNQSSDELQLS |
| | | | | MGNAMFVKEQLSLLDRF |
| | | | | TEDAKRLYGSEAFATDF |
| | | | | QDSAAAKKLINDYVKNG |
| | | | | TRGKITDLIKDLDSQTM |
| | | | | MVLVNYIFFKAKWEMPF |
| | | | | DPQDTHQSRFYLSKKKW |
| | | | | VMVPMMSLHHLTIPYFR |
| | | | | DEELSCTVVELKYTGNA |
| | | | | SALFILPDQDKMEEVEA |
| | | | | MLLPETLKRWRDSLEFR |
| | | | | EIGELYLPKFSISRDYN |
| | | | | LNDILLQLGIEEAFTSK |
| | | | | ADLSGITGARNLAVSQV |
| | | | | VHKAVLDVFEEGTEASA |
| | | | | ATAVKITLLSALVETRT |
| | | | | IVRFNRPFLMIIVPTDT |
| | | | | QNIFFMSKVTNPKQA |
| CO6 | Comple- | P13671 | 178 | MARRSVLYFILLNALIN |
| | ment | | | KGQACFCDHYAWTQWTS |
| | compo- | | | CSKTCNSGTQSRHRQIV |
| | nent C6 | | | VDKYYQENFCEQICSKQ |
| | | | | ETRECNWQRCPINCLLG |
| | | | | DFGPWSDCDPCIEKQSK |
| | | | | VRSVLRPSQFGGQPCTA |
| | | | | PLVAFQPCIPSKLCKIE |
| | | | | EADCKNKFRCDSGRCIA |
| | | | | RKLECNGENDCGDNSDE |
| | | | | RDCGRTKAVCTRKYNPI |
| | | | | PSVQLMGNGFHFLAGEP |
| | | | | RGEVLDNSFTGGICKTV |
| | | | | KSSRTSNPYRVPANLEN |
| | | | | VGFEVQTAEDDLKTDFY |
| | | | | KDLTSLGHNENQQGSFS |
| | | | | SQGGSSFSVPIFYSSKR |
| | | | | SENINHNSAFKQAIQAS |
| | | | | HKKDSSFIRIHKVMKVL |
| | | | | NFTTKAKDLHLSDVFLK |
| | | | | ALNHLPLEYNSALYSRI |
| | | | | FDDFGTHYFTSGSLGGV |
| | | | | YDLLYQFSSEELKNSGL |
| | | | | TEEEAKHCVRIETKKRV |
| | | | | LFAKKTKVEHRCTTNKL |
| | | | | SEKHEGSFIQGAEKSIS |
| | | | | LIRGGRSEYGAALAWEK |
| | | | | GSSGLEEKTFSEWLESV |
| | | | | KENPAVIDFELAPIVDL |
| | | | | VRNIPCAVTKRNNLRKA |
| | | | | LQEYAAKFDPCQCAPCP |
| | | | | NNGRPTLSGTECLCVCQ |
| | | | | SGTYGENCEKQSPDYKS |
| | | | | NAVDGQWGCWSSWSTCD |
| | | | | ATYKRSRTRECNNPAPQ |
| | | | | RGGKRCEGEKRQEEDCT |
| | | | | FSIMENNGQPCINDDEE |
| | | | | MKEVDLPEIEADSGCPQ |
| | | | | PVPPENGFIRNEKQLYL |
| | | | | VGEDVEISCLTGFETVG |
| | | | | YQYFRCLPDGTWRQGDV |
| | | | | ECQRTECIKPVVQEVLT |
| | | | | ITPFORLYRIGESIELT |
| | | | | CPKGFVVAGPSRYTCQG |
| | | | | NSWTPPISNSLTCEKDT |
| | | | | LTKLKGHCQLGQKQSGS |
| | | | | ECICMSPEEDCSHHSED |
| | | | | LCVFDTDSNDYFTSPAC |
| | | | | KFLAEKCLNNQQLHFLH |
| | | | | IGSCQDGRQLEWGLERT |
| | | | | RLSSNSTKKESCGYDTC |
| | | | | YDWEKCSASTSKCVCLL |
| | | | | PPQCFKGGNQLYCVKMG |
| | | | | SSTSEKTLNICEVGTIR |
| | | | | CANRKMEILHPGKCLA |
| CERU | Cerulo- | P00450 | 179 | MKILILGIFLFLCSTPA |
| | plasmin | | | WAKEKHYYIGIIETTWD |
| | | | | YASDHGEKKLISVDTEH |
| | | | | SNIYLQNGPDRIGRLYK |
| | | | | KALYLQYTDETFRTTIE |
| | | | | KPVWLGFLGPIIKAETG |
| | | | | DKVYVHLKNLASRPYTF |
| | | | | HSHGITYYKEHEGAIYP |
| | | | | DNTTDFQRADDKVYPGE |
| | | | | QYTYMLLATEEQSPGEG |
| | | | | DGNCVTRIYHSHIDAPK |
| | | | | DIASGLIGPLIICKKDS |
| | | | | LDKEKEKHIDREFVVMF |
| | | | | SVVDENFSWYLEDNIKT |
| | | | | YCSEPEKVDKDNEDFQE |
| | | | | SNRMYSVNGYTFGSLPG |
| | | | | LSMCAEDRVKWYLFGMG |
| | | | | NEVDVHAAFFHGQALTN |
| | | | | KNYRIDTINLFPATLFD |
| | | | | AYMVAQNPGEWMLSCQN |
| | | | | LNHLKAGLQAFFQVQEC |
| | | | | NKSSSKDNIRGKHVRHY |
| | | | | YIAAEEIIWNYAPSGID |
| | | | | IFTKENLTAPGSDSAVF |
| | | | | FEQGTTRIGGSYKKLVY |
| | | | | REYTDASFTNRKERGPE |
| | | | | EEHLGILGPVIWAEVGD |
| | | | | TIRVTFHNKGAYPLSIE |
| | | | | PIGVRFNKNNEGTYYSP |
| | | | | NYNPQSRSVPPSASHVA |
| | | | | PTETFTYEWTVPKEVGP |
| | | | | TNADPVCLAKMYYSAVD |
| | | | | PTKDIFTGLIGPMKICK |
| | | | | KGSLHANGRQKDVDKEF |
| | | | | YLFPTVFDENESLLLED |
| | | | | NIRMFTTAPDQVDKEDE |
| | | | | DFQESNKMHSMNGFMYG |
| | | | | NQPGLTMCKGDSVVWYL |
| | | | | FSAGNEADVHGIYFSGN |
| | | | | TYLWRGERRDTANLFPQ |
| | | | | TSLTLHMWPDTEGTFNV |
| | | | | ECLTTDHYTGGMKQKYT |
| | | | | VNQCRRQSEDSTFYLGE |
| | | | | RTYYIAAVEVEWDYSPQ |
| | | | | REWEKELHHLQEQNVSN |
| | | | | AFLDKGEFYIGSKYKKV |
| | | | | VYRQYTDSTFRVPVERK |
| | | | | AEEEHLGILGPQLHADV |
| | | | | GDKVKIIFKNMATRPYS |
| | | | | IHAHGVQTESSTVTPTL |
| | | | | PGETLTYVWKIPERSGA |
| | | | | GTEDSACIPWAYYSTVD |
| | | | | QVKDLYSGLIGPLIVCR |
| | | | | RPYLKVFNPRRKLEFAL |
| | | | | LFLVFDENESWYLDDNI |
| | | | | KTYSDHPEKVNKDDEEF |
| | | | | IESNKMHAINGRMFGNL |
| | | | | QGLTMHVGDEVNWYLMG |
| | | | | MGNEIDLHTVHFHGHSF |
| | | | | QYKHRGVYSSDVFDIFP |
| | | | | GTYQTLEMFPRTPGIWL |
| | | | | LHCHVTDHIHAGMETTY |
| | | | | TVLQNEDTKSG |
| KNG1 | Kinino- | P01042 | 180 | MKLITILFLCSRLLLSL |
| | gen-1 | | | TQESQSEEIDCNDKDLF |
| | | | | KAVDAALKKYNSQNQSN |
| | | | | NQFVLYRITEATKTVGS |
| | | | | DTFYSFKYEIKEGDCPV |
| | | | | QSGKTWQDCEYKDAAKA |
| | | | | ATGECTATVGKRSSTKF |
| | | | | SVATQTCQITPAEGPVV |
| | | | | TAQYDCLGCVHPISTQS |
| | | | | PDLEPILRHGIQYFNNN |
| | | | | TQHSSLFMLNEVKRAQR |
| | | | | QVVAGLNFRITYSIVQT |
| | | | | NCSKENFLFLTPDCKSL |
| | | | | WNGDTGECTDNAYIDIQ |
| | | | | LRIASFSQNCDIYPGKD |
| | | | | FVQPPTKICVGCPRDIP |
| | | | | TNSPELEETLTHTITKL |
| | | | | NAENNATFYFKIDNVKK |
| | | | | ARVQVVAGKKYFIDFVA |
| | | | | RETTCSKESNEELTESC |
| | | | | ETKKLGQSLDCNAEVYV |
| | | | | VPWEKKIYPTVNCQPLG |
| | | | | MISLMKRPPGFSPFRSS |
| | | | | RIGEIKEETTVSPPHTS |
| | | | | MAPAQDEERDSGKEQGH |
| | | | | TRRHDWGHEKQRKHNLG |
| | | | | HGHKHERDQGHGHQRGH |
| | | | | GLGHGHEQQHGLGHGHK |
| | | | | FKLDDDLEHQGGHVLDH |
| | | | | GHKHKHGHGHGKHKNKG |
| | | | | KKNGKHNGWKTEHLASS |
| | | | | SEDSTTPSAQTQEKTEG |
| | | | | PTPIPSLAKPGVTVTFS |
| | | | | DFQDSDLIATMMPPISP |
| | | | | APIQSDDDWIPDIQIDP |
| | | | | NGLSFNPISDFPDTTSP |
| | | | | KCPGRPWKSVSEINPTT |
| | | | | QMKESYYFDLTDGLS |
| KLKB1 | Plasma | P03952 | 181 | MILFKQATYFISLFATV |
| | Kalli- | | | SCGCLTQLYENAFFRGG |
| | krein | | | DVASMYTPNAQYCQMRC |
| | | | | TFHPRCLLFSFLPASSI |
| | | | | NDMEKRFGCFLKDSVTG |
| | | | | TLPKVHRTGAVSGHSLK |
| | | | | QCGHQISACHRDIYKGV |
| | | | | DMRGVNFNVSKVSSVEE |
| | | | | CQKRCTNNIRCQFFSYA |
| | | | | TQTFHKAEYRNNCLLKY |
| | | | | SPGGTPTAIKVLSNVES |
| | | | | GFSLKPCALSEIGCHMN |
| | | | | IFQHLAFSDVDVARVLT |
| | | | | PDAFVCRTICTYHPNCL |
| | | | | FFTFYTNVWKIESQRNV |
| | | | | CLLKTSESGTPSSSTPQ |
| | | | | ENTISGYSLLTCKRTLP |
| | | | | EPCHSKIYPGVDFGGEE |
| | | | | LNVTFVKGVNVCQETCT |
| | | | | KMIRCQFFTYSLLPEDC |
| | | | | KEEKCKCFLRLSMDGSP |
| | | | | TRIAYGTQGSSGYSLRL |
| | | | | CNTGDNSVCTTKTSTRI |
| | | | | VGGTNSSWGEWPWQVSL |
| | | | | QVKLTAQRHLCGGSLIG |
| | | | | HQWVLTAAHCFDGLPLQ |
| | | | | DVWRIYSGILNLSDITK |
| | | | | DTPFSQIKEIIIHQNYK |
| | | | | VSEGNHDIALIKLQAPL |
| | | | | NYTEFQKPICLPSKGDT |
| | | | | STIYTNCWVTGWGFSKE |
| | | | | KGEIQNILQKVNIPLVT |
| | | | | NEECQKRYQDYKITQRM |
| | | | | VCAGYKEGGKDACKGDS |
| | | | | GGPLVCKHNGMWRLVGI |
| | | | | TSWGEGCARREQPGVYT |
| | | | | KVAEYMDWILEKTQSSD |
| | | | | GKAQMQSPA |
| ANGT | Angio- | P01019 | 182 | MRKRAPQSEMAPAGVSL |
| | tensin- | | | RATILCLLAWAGLAAGD |
| | ogen | | | RVYIHPFHLVIHNESTC |
| | | | | EQLAKANAGKPKDPTFI |
| | | | | PAPIQAKTSPVDEKALQ |
| | | | | DQLVLVAAKLDTEDKLR |
| | | | | AAMVGMLANFLGFRIYG |
| | | | | MHSELWGVVHGATVLSP |
| | | | | TAVFGTLASLYLGALDH |
| | | | | TADRLQAILGVPWKDKN |
| | | | | CTSRLDAHKVLSALQAV |
| | | | | QGLLVAQGRADSQAQLL |
| | | | | LSTVVGVFTAPGLHLKQ |
| | | | | PFVQGLALYTPVVLPRS |
| | | | | LDFTELDVAAEKIDRFM |
| | | | | QAVTGWKTGCSLMGASV |
| | | | | DSTLAFNTYVHFQGKMK |
| | | | | GFSLLAEPQEFWVDNST |
| | | | | SVSVPMLSGMGTFQHWS |
| | | | | DIQDNFSVTQVPFTESA |
| | | | | CLLLIQPHYASDLDKVE |
| | | | | GLTFQQNSLNWMKKLSP |
| | | | | RTIHLTMPQLVLQGSYD |
| | | | | LQDLLAQAELPAILHTE |
| | | | | LNLQKLSNDRIRVGEVL |
| | | | | NSIFFELEADEREPTES |
| | | | | TQQLNKPEVLEVTLNRP |
| | | | | FLFAVYDQSATALHFLG |
| | | | | RVANPLSTA |

[1113] Table 32 identifies and defines the glycan structures included in Table 28, all of which are N-glycans. Table 32 identifies a coded representation of the composition for each glycan structure included in Table 28. As used herein, the 4-digit GL NO. is a designation that represents the number of hexoses, the number of HexNAcs, the number of Fucoses, and the number of Neuraminic Acids. Table 32 illustrates the symbol structure and composition of detected glycan moieties that correspond to glycopeptides of Table 28 based on the Glycan GL NO. The term Symbol Structure illustrates a geometric linking structure of the carbohydrates where the bottommost carbohydrate such as N-acetylglucosamine is bound to the designated amino acid for an N-linked glycan and the rightmost carbohydrate such as N-acetylgalactosamine is bound to the designated amino acid for an O-linked glycan. For reference, N-linked glycans have a glycan attached to the amino acid asparagine and O-linked glycans have a glycan attached to either a serine or a threonine.

[14] The term Composition refers to the number of various classes of carbohydrates that make up the glycan. The quantity for each class of carbohydrate is depicted as a number in parenthesis to the right of an abbreviation that corresponds to the class of the carbohydrate. The abbreviations for these classes are Hex, HexNAc, Fuc, and NeuAc that respectively correspond to hexose, N-acetylhexosamine, fucose, and N-acetylneuraminic acid. It should be noted that hexose sugars include glucose, galactose, and mannose; and N-acetylhexosamine sugars includes N-acetylglucosamine, N-acetylgalactosamine, and N-acetylmannosamine. In various embodiments, the terms Neu5Ac, NeuAc, and N-acetylneuraminic acid may be referred to as sialic acid.
[15] Referring back to Table 32, for some entries, there are two symbol structures provided for one Glycan Structure GL NO such as, for example, Glycan Structure GL NO 5400. Thus, the identify of a peptide that references a Glycan Structure GL NO that has two symbol structures could be one of two possibilities based on the MRM of the LC-MS analysis. In some instances, a bracket symbol is used as part of the Symbol Structure to indicate that the precise bonding linkage is not exactly known, but that the linking line segment is attached to one of the plurality of adjacent carbohydrates immediately adjacent to the bracket.

TABLE 32
Glycan structure GL NO, symbol structure, and composition

| Glycan | | | |
|---|---|---|---|
| Structure | Symbol | Glycan | Glycan_{—} |
| GL NO. | Structure. | Composition | MW |
| 5402 | [symbol] | Hex(5)HexNAc(4)Fuc(0)NeuAc(2) | 2204.772392 |
| 6503 | [symbol] | Hex(6)HexNAc(5)Fuc(0)NeuAc(3) | 2860.99999 |
| 6513 | [symbol] | Hex(6)HexNAc(5)Fuc(1)NeuAc(3) | 3007.057896 |
| 7603 | [symbol] | Hex(7)HexNAc(6)Fuc(0)NeuAc(3) | 3226.132178 |
| 7604 | [symbol] | Hex(7)HexNAc(6)Fuc(0)NeuAc(4) | 3517.227588 |
| 7614 | [symbol] | Hex(7)HexNAc(6)Fuc(1)NeuAc(4) | 3663.285494 |
| 7624 | [symbol] | Hex(7)HexNAc(6)Fuc(2)NeuAc(4) | 3809.3434 |
| 5401 | [symbol] | Hex(5)HexNAc(4)Fuc(0)NeuAc(1) | 1913.676982 |
| 5412 | [symbol] | Hex(5)HexNAc(4)Fuc(1)NeuAc(2) | 2350.830298 |
| 6502 | [symbol] | Hex(6)HexNAc(5)Fuc(0)NeuAc(2) | 2569.90458 |
| 5411 | [symbol] | Hex(5)HexNAc(4)Fuc(1)NeuAc(1) | 2059.734888 |
| 5400 | [symbol] | Hex(5)HexNAc(4)Fuc(0)NeuAc(0) | 1622.581572 |
| 5410 | [symbol] | Hex(5)HexNAc(4)Fuc(1)NeuAc(0) | 1768.639478 |
| 5502 | [symbol] | Hex(5)HexNAc(5)Fuc(0)NeuAc(2) | 2407.85176 |

Legend for Table 32:
● Glc [symbol]
Gal [symbol]
Man [symbol]
Fuc [symbol]
Neu5Ac
▪ GlcNAc [symbol]
GalNAc [symbol]
ManNAc

[16] The identity of the various monosaccharides is illustrated by the Legend section located at the end of Table 32. The abbreviations of the Legend are Glc that represents glucose and is indicated by a dark circle, Gal that represents galactose and is indicated by an open circle, Man that represents mannose and is indicated by a circle with intermediate grey shading, Fuc that represents fucose and is indicated by a dark triangle, Neu5Ac that represents N-acetylneuraminic acid and is indicated by a dark diamond, GlcNAc that represents N-acetylglucosamine and is indicated by a dark square, GalNAc that represents N-acetylgalactosamine and is indicated by an open square, and ManNAc that represents N-acetylmannosamine and is indicated by a square with intermediate grey shading.
[17] Aspects of the disclosure include kits comprising one or more compositions, each comprising one or more peptide structures of the disclosure that can be used as assay standards, and instructions for use. Kits in accordance with one or more embodiments described herein may include a label indicating the intended use of the contents of the kit. The term “label” as used herein with respect to a kit includes any writing, or recorded material supplied on or with a kit, or that otherwise accompanies a kit.
[18] The peptide structures and the transitions produced therefrom, as described herein, may be useful as quality control compositions and data with respect to a group of samples. A transition includes a precursor ion and at least one product ion grouping. As reviewed herein, the peptide structures in Table 28, as well as their corresponding precursor ion and product ion groupings (these ions having defined m/z ratios or m/z ratios that fall within the m/z ranges identified herein) in Table 29, can be used in mass spectrometry-based analyses to diagnose and facilitate treatment of diseases, such as, for example, adenoma or CRC.
[19] Aspects of the disclosure include methods for analyzing one or more peptide structures, as described herein. In some embodiments, the methods involve processing a sample from a subject, such as a patient, to generate a prepared sample that can be inputted into a mass spectrometry system (e.g., a reaction monitoring mass spectrometry system). In certain embodiments, processing the sample can comprise performing one or more of: a denaturation procedure, a reduction procedure, an alkylation procedure, and a digestion procedure. The denaturation and reduction procedures may be implemented in a manner similar to, for example, denaturation and reduction 202 in FIG. 2. The alkylation procedure may be implemented in a manner similar to, for example, alkylation procedure 204 in FIG. 2. The digestion procedure may be implemented in a manner similar to, for example, digestion procedure 206 in FIG. 2.
[20] In some embodiments, the methods for analyzing one or more peptide structures involve detecting a set of product ions generated by a reaction monitoring mass spectrometry system in which one or more product ions may correspond to each of the one or more peptide structures that have been inputted into the mass spectrometry system. As described herein, each peptide structure can be converted into a set of product ions having a defined m/z ratio, as provided in Table 29 and the m/z ratio is within a predetermined interval. In some embodiments, the methods involve generating quantification (e.g., abundance) data for the one or more product ions detected using the reaction monitoring mass spectrometry system.
[21] In some embodiments, the methods further comprise generating a diagnosis output using the quantification data and a model that has been trained using supervised or unsupervised machine learning. In certain embodiments, the reaction monitoring mass spectrometry system may include multiple/selected reaction monitoring mass spectrometry (MRM/SRM-MS) to detect the one or more product ions and generate the quantification data.

### XIV.D. Representative Experimental Results

[1114] To assess the performance of the model for age-associated peptide structures (biomarkers), results are illustrated in FIGS. 27A-27C for healthy cohort of samples, and in FIGS. 28A-28C for samples from diseased subjects and samples from healthy subjects. It is worthwhile to note that in FIGS. 27A-27C and 28A-28C that the correlation coefficient R was greater than 0.2 suggesting that the correlation between the chronological age and the predicted age were sufficiently accurate indicating an absence of a quality control issue with respect to this test.

[1115] FIGS. 27A, 27B, and 27C illustrate plots of predicted age versus chronological age for healthy subjects to determine correlation coefficients of various cohorts.

[1116] FIGS. 28A, 28B, and 28C illustrate plots of predicted age versus chronological age for samples that include both disease and healthy subjects to determine correlation coefficients of various cohorts.

[1117] To assess the performance of the model for sex-associated peptide structures (biomarkers), results are illustrated in FIGS. 32A-32C for samples with both disease and healthy conditions.

[1118] FIGS. 32A, 32B, and 32C illustrate plots of accuracy score, sensitivity score, and specificity score for training and test datasets.

### Exemplary Embodiments for Quality Control

[1119] Methods of the disclosure encompass various embodiments of quality control glycopeptide compositions that can be utilized as an indicator for whether or not the method had one or more errors of any kind. In various embodiments, a grouping of glycopeptide and peptide compositions are associated with a ground truth about an expected age or range of ages of members of a group of subjects having samples tested therefor. The age information that is known to be real or true may be based on prior knowledge from annotation of the respective samples, for example.

[1120] In specific embodiments, a batch of samples in need of analysis or measuring, such as for disease diagnosis and/or treatment, are analyzed for the disease diagnosis and/or treatment. The samples are also analyzed or measured for one or more peptide structures of Table 23, and the outcome of this quality check analysis or measuring is used as an indicator for the quality of the method for disease diagnosis and/or treatment. If the one or more peptide structures of Table 23 are not present in the samples as predicted (qualitatively or quantitatively), this indicates that collectively the predicted age of the subjects is erroneous, and it can be considered that there was an error in the process and/or an error with sample annotation (including sample annotation for one or more of the samples, in some cases at least the majority of samples). Examples of points of error in the method include measuring by mass spectrometry, ionizing glycopeptides with a mass spectrometer, digesting proteins into glycopeptides, annotating one or more samples, user error, equipment failure, inputting data associated with each of the subjects into a database that includes chronological age, randomizing samples and mapping the samples to an autosampler for inputting into a LCMS, or a combination thereof.

[1121] In various embodiments, there are methods of performing quality control for a group of subject samples, comprising the step of assaying or measuring for one or more age-related peptide structures identified in Table 23. In some cases, there is comparison of one or more age-related peptide structures assayed for or measured from the samples to a reference set of the corresponding one or more age-related peptide structures in Table 23. In embodiments in which the one or more age-related peptide structures are identified in the samples as predicted, the method is considered to have suitable quality, the method is considered to lack any substantive errors, and so forth. In embodiments wherein the one or more age-related peptide structures are not identified in the samples or are at an incorrect quantity (or range of quantity), including one that is not predicted, the method can be considered not to have suitable quality, the method can be considered to have one or more substantive processing, instrumental, and/or human errors, and so forth.

[1122] In particular embodiments, the methods allow utilization of one or more age-related peptide structures in Table 23 as an indicator of quality control for a batch of samples, and the presence or quantity of the structures are indicative of a specific age (within a year) of a subject or of a range of age of a subject. The range of age may be 2, 3, 4, 5, 6, 7, 8, 9, 10, or more years. The range may be within 2, 3, 4, 5, 6, 7, 8, 9, or 10 or more years of the chronological age. The range may be, or may be about, 1-10, 1-9, 1-8, 1-7, 1-6, 1-5, 1-4, 1-3, 1-2, 2-10, 2-9, 2-8, 2-7, 2-6, 2-5, 2-4, 2-3, 3-10, 3-9, 3-8, 3-7, 3-6, 3-5, 3-4, 4-10, 4-9, 4-8, 4-7, 4-6, 4-5, 5-10, 5-9, 5-8, 5-7, 5-6, 6-10, 6-9, 6-8, 6-7, 7-10, 7-9, 7-8, 8-10, 8-9, or 9-10 years within the chronological age.

[1123] Methods of the disclosure encompass various embodiments of quality control glycopeptide compositions that can be utilized as an indicator for whether or not the method had one or more errors of any kind. In various embodiments, a grouping of glycopeptide and peptide compositions are associated with a ground truth about an expected biological sex of members of a group of subjects having samples tested therefor. The sex information that is known to be real or true may be based on prior knowledge from annotation of the respective samples, for example.

[1124] In specific embodiments, a batch of samples in need of analysis or measuring, such as for disease diagnosis and/or treatment, are analyzed for the disease diagnosis and/or treatment. The samples are also analyzed or measured for one or more peptide structures of Table 28, and the outcome of this quality check analysis or measuring is used as an indicator for the quality of the method for disease diagnosis and/or treatment. If the one or more peptide structures of Table 28 are not present in the samples as predicted (qualitatively or quantitatively), this indicates that collectively the predicted sex of the subjects is erroneous, and it can be considered that there was an error in the process and/or an error with sample annotation (including sample annotation for one or more of the samples, in some cases at least the majority of samples). Examples of points of error in the method include measuring by mass spectrometry, ionizing glycopeptides with a mass spectrometer, digesting proteins into glycopeptides, annotating one or more samples, user error, equipment failure, inputting data associated with each of the subjects into a database that includes annotated sex, randomizing samples and mapping the samples to an autosampler for inputting into a LCMS, and a combination thereof.

[1125] In various embodiments, there are methods of performing quality control for a group of subject samples, comprising the step of assaying or measuring for one or more sex-related peptide structures identified in Table 28. In some cases, there is comparison of one or more sex-related peptide structures assayed for or measured from the samples to a reference set of the corresponding one or more sex-related peptide structures in Table 28. In embodiments in which the one or more sex-related peptide structures are identified in the samples as predicted, the method is considered to have suitable quality, the method is considered to lack any substantive errors, and so forth. In embodiments wherein the one or more sex-related peptide structures are not identified in the samples or are at an incorrect quantity (or range of quantity), including one that is not predicted, the method can be considered not to have suitable quality, the method can be considered to have one or more substantive processing, instrumental, and/or human errors, and so forth.

### I. Representative Experimental Results—Ovarian Cancer

### I.A. Exemplary Retrospective Analysis

### I.A.1. Sample Acquisition

[1126] FIG. 50 is a table describing the distribution of the samples acquired in this exemplary retrospective analysis in accordance with one or more embodiments. As shown in FIG. 50, serum samples were acquired from a commercial biobank for 151 women with benign pelvic masses, 145 women with malignant epithelial ovarian cancer (EOC), and 55 healthy controls. Information on stage of EOC was available in 98 of the 145 patients with EOC. All samples were obtained prior to therapeutic intervention. Information on the benign or malignant nature of tumors was based on histopathological analysis of tissue specimens.

### I.A.2. Sample Processing

[1127] Sample processing involved pooled human serum/plasma (e.g., glycoprotein standards purified from human serum/plasma) for assay normalization, dithiothreitol (DTT), and iodoacetamide (IAA), sequencing-grade trypsin, LC-MS-grade water and acetonitrile, and formic acid (LC-MS grade). Serum samples were treated with DTT and IAA to reduce disulfide bonds and to inhibit cysteine proteases, respectively, followed by digestion with trypsin at 37° C. for 18 hours. The digestion was quenched by adding formic acid to each sample to a final concentration of 1% (v/v).

[1128] LC-MS analysis included separating digested serum samples over an Agilent ZORBAX Eclipse Plus C18 column (2.1 mm×150 mm i.d., 1.8 μm particle size) using an Agilent 1290 Infinity UHPLC system. The mobile phase A consisted of 3% acetonitrile, 0.1% formic acid in water (v/v), and the mobile phase B of 90% acetonitrile 0.1% formic acid in water (v/v), with the flow rate set at 0.5 mL/minute. The binary solvent composition was set at 100% mobile phase A at the beginning of the run, linearly shifting to 20% B at 20 minutes, 30% B at 40 minutes, and 44% B at 47 minutes. The column was flushed with 100% B and equilibrated with 100% A for a total run time of 70 minutes. After electrospray ionization, operated in positive ion mode, samples were injected into an Agilent 6495B triple quadrupole MS operated in dynamic multiple reaction monitoring (dMRM) mode. The MRM transitions comprised 513 glycopeptide structures which were normalized by comparing them with the abundance of 71 non-glycosylated peptide structures, representing each of 71 proteins from which the glycopeptides monitored were derived. Samples were injected randomized as to underlying phenotype, and reference pooled serum digests were injected interspersed with study samples.

### I.A.3. Data Analysis

[1129] Analysis resulted in 683 peptide structures (both peptide and glycopeptide isoforms) being reflected by 1106 MRM transitions, representing 71 high-abundance (concentrations [symbol] of 10 μg/ml) serum glycoproteins. Our transition list consisted of glycopeptides and non-glycosylated peptides from each glycoprotein. A spectrogram feature recognition and integration software based on recurrent neural networks was used to integrate chromatogram peaks and to obtain molecular abundance quantification for each peptide structure.

[1130] Normalized abundances of peptide structures, corrected for within-run drift, were assessed in samples from healthy controls, patients with benign pelvic tumors and those with EOC. Raw abundances were normalized by using spiked-in heavy-isotope-labeled internal standards with known peptide concentrations. The calculation relies either on relative abundance or on site occupancy, i.e., on the fractional abundance across all glycans observed at that site. Log-transformed concentration-normalized data for 501 glycopeptide structures (452 of which are based on on-site occupancy and 49 on relative abundance) and for 70 aglycosylated peptide structures were ultimately used for the analysis, totaling 571 unique peptide structures. Fold changes for individual peptide structures were calculated on normalized abundances of healthy (control) vs. EOC samples and benign tumor vs. EOC samples. False discovery rates (FDR) were calculated using the Benjamini-Hochberg method. Principal component analysis (PCA) was performed on log-concentration-normalized abundances of glycopeptide structures to investigate differences among the three phenotypes (e.g., healthy control, EOC, and benign pelvic tumor) studied. Prior to performing PCA, normalized abundances were scaled such that the distributions of all biomarkers were Gaussian with zero mean and unit variance.

[1131] To compare any two phenotypes, age-adjusted linear regression was used on a feature-by-feature basis with phenotype serving as the sole binary independent variable. Correcting for multiple comparisons, differences of any biomarker among phenotype groups compared were considered statistically significant where the FDR was less than 0.05. Examples of features include relative abundance (or normalized relative abundance), concentration (or normalized concentration), and site occupancy (fractional abundance across all glycans observed at the corresponding linking site of the corresponding peptide sequence).

[1132] For supervised multivariate modeling, a total of 1084 features (571 concentration, 49 relative abundance, and 464 site occupancy features) were log-transformed and split into a training set formed by 80% of all samples from women with benign pelvic tumors and EOC, and a testing set formed by the remaining 20% of these women and all healthy controls. To perform binary classification and predict the probability of EOC, repeated five-fold cross-validated LASSO-regularized logistic regression was used with hyperparameters tuned to prevent overfitting and promote balanced sensitivity and specificity metrics. Training of the binary classification model was performed using the subset of the 1084 total features having low coefficients of variation (<20%) in pooled serum replicates. This subset included 976 features, with each feature being a concentration, relative abundance, or site occupancy for a corresponding peptide structure and where some peptide structures correspond with multiple features. For example, a given peptide structure may be associated with one, two, or three features within the subset of the 976 features.

### I.A.4. Results

[1133] Normalized abundances of 428 peptide structures were found to display statistically significantly different abundances (FDR<0.05) in samples of patients with benign pelvic tumors and samples of patients with EOC. 139 peptide structures had statistically significant abundance differences between benign vs. early stage (e.g., stage 1 or 2) EOC. 412 peptide structures had statistically significant abundance differences between benign vs. late stage (e.g., stage 3 or 4) EOC, 137 of which overlapped with those for benign v. early stage. When comparing samples of healthy controls with samples from all EOCs, benign tumors, early stage (e.g., stage 1 or 2) EOC, and late stage (e.g., stage 3 or 4) EOC, statistically significant abundances were found for 386, 149, 215, and 365 markers, respectively. 120 peptide structures were found to be statistically significantly differentially abundant in healthy controls vs. patients with benign pelvic tumors, and in healthy control vs. EOC. 200 peptide structures were found to be statistically significantly differentially abundant in in healthy control vs. early stage EOC and healthy control vs. late stage EOC. Lastly, of the 428 and 386 markers that were found statistically significantly differentially expressed between EOC vs. benign pelvic tumors and EOC vs. healthy controls, respectively, 328 were shared.

[1134] FIG. 51 is a plot diagram illustrating the results of a principal component analysis performed to assess the segregation between healthy, benign pelvic tumor, and EOC samples across first and second principal components in accordance with one or more embodiments. Generally, EOC samples segregated distinctly from healthy control samples, while most benign pelvic tumors did not segregate as distinctly from healthy control samples.

[1135] FIG. 52 is a plot diagram illustrating the results of a principal component analysis performed to assess segregation between healthy, benign pelvic tumor, early EOC, late EOC, and missing (undocumented) samples). Generally, EOC samples (and in particular late stage EOC samples) segregated distinctly from healthy control samples, while most benign pelvic tumors did not segregate as distinctly from healthy control samples.

### I.A.5. Results in Context of Screening for Malignant EOC

[1136] To assess the suitability of serum glycoproteomics in the context of screening for malignant EOC, a multivariable model was built to predict EOC vs. healthy status. This multivariable model is a supervised machine learning model that includes a logistic regression model, the logistic regression model including a LASSO regression model. Repeated cross-validation in the training set established the optimal LASSO hyperparameter (lambda=0.0608, cross-validated F1=0.971). Applying this amount of shrinkage to the panel of 976 features resulted in a logistic model with 10 peptide structures with non-zero coefficients.

[1137] FIG. 53 is an illustration of a receiver operating characteristic (ROC) diagram corresponding to the multivariable model built to predict malignancy v. benign status of pelvic tumors in accordance with one or more embodiments. The multivariable model achieved high accuracy in both the training set (accuracy=0.975, sensitivity=0.983, specificity=0.955) and the test set (accuracy=0.976, sensitivity=0.967, specificity=1.0). Further, ROC analysis demonstrated strong performance across a range of cutoffs, and little overfitting, with the training AUC (area under the curve)=0.999 and test AUC=0.997.

[1138] Thus, the multivariable model that was built may be used accurately and reliably to malignant EOC and distinguish such malignancy from a healthy status. Such diagnostic power may be used to reduce the need for unnecessary invasive testing. Further, such diagnostic information can be used to identify patients with EOC earlier, which may lead to earlier treatment, improved treatment recommendations, and improved treatment plans.

[1139] FIG. 54 is an illustration of a diagram showing the probability distributions for the various groups using the multivariable model for predicting malignancy v. benign status of pelvic tumors in accordance with one or more embodiments. As shown in FIG. 54, the probability distributions for benign pelvic tumor, healthy, missing (undocumented), stage 1 EOC, stage 2 EOC, stage 3 EOC, and stage 4 EOC samples increased with cancer stage, with probability distributions being similar across training and test sets. Notably, applying the built multivariable model to healthy patients, who were not utilized in the training, resulted in few misclassifications and a spread nearly equivalent to that of the benign pelvic tumor cases. Such results indicate that the glycoproteomic signature of the solidly predicts malignancy and severity of disease.

[1140] Table 48 below provides the fold changes, FDRs, and p-values for the 10 peptide structures PS-165 to PS-174 (same as those in Table 41 above) based on differential expression analysis (DEA). The peptide structures PS-165 to PS-174 are ordered both in Table 41 and in Table 48 with respect to relative significance to the probability score generated by the model. More significant peptide structures had higher coefficients in the LASSO regression model, while less significant peptide structures had lower coefficients in the LASSO regression model. In other words, relative significance to the probability score decreased with decreasing coefficients. Further, each peptide structure is associated with a feature that was used for the model (relab=relative abundance; conc=concentration).

TABLE 48
Peptide Structure Markers for Regression Model to distinguish
between Epithelial Ovarian Cancer and Healthy State

| | | Healthy v | Healthy v | Healthy v | |
|---|---|---|---|---|---|
| PS- | | EOC | EOC | EOC | |
| ID NO. | PS-NAME | (Fold Change) | (FDR) | (p-value) | Feature |
| 165 | ZA2G_128_5402 | 1.57212 | 1.99E−13 | 3.14E−15 | relab |
| 166 | IC1_253_6503 | 2.26917 | 6.42E−18 | 2.25E−20 | conc |
| 167 | CFAI_494_5402 | 1.30391 | 3.00E−07 | 4.78E−08 | relab |
| 168 | CERU_138_6513 | 1.37235 | 2.14E−06 | 4.85E−07 | relab |
| 169 | IGG1_297_3410 | 1.98807 | 1.03E−09 | 6.47E−11 | conc |
| 170 | HEMO_64_5402 | 1.53316 | 3.06E−11 | 1.12E−12 | relab |
| 171 | APOB_983_5402 | 1.98566 | 1.11E−13 | 1.17E−15 | conc |
| CK-1 | FINC_SYTITGLQPGTDYK | 0.51932 | 9.92e−09 | 1.043e−09 | relab |
| 172 | HPT_207_121005 | 2.21826 | 3.17E−10 | 1.66E−11 | conc |
| 173 | IGG3_297_3400 | N/A | N/A | N/A | relab |
| 174 | IGG34_297_3400 | N/A | N/A | N/A | relab |
| CK-2 | APOM_135_8500_CHK | 0.59098 | 1.58e−17 | 8.28e−20 | conc |

### I.A.6. Results in Context of Triaging Pelvic Tumors

[1141] To assess the suitability of serum glycoproteomics in the context of clinically triaging pelvic tumors, a multivariable model was built to predict malignancy vs. benign status of such pelvic tumors. This multivariable model is a supervised machine learning model that includes a logistic regression model, the logistic regression model including a LASSO regression model. Repeated cross-validation in the training set established the optimal LASSO hyperparameter (lambda=0.045, cross-validated F1=0.849). Applying this amount of shrinkage to the panel of 976 features resulted in a logistic model with 25 peptide structures with non-zero coefficients.

[1142] FIG. 55 is an illustration of a receiver operating characteristic (ROC) diagram corresponding to the multivariable model built to predict malignancy v. benign status of pelvic tumors in accordance with one or more embodiments. The multivariable model achieved high accuracy in both the training set (accuracy=0.869, sensitivity=0.835, specificity=0.901) and the test set (accuracy=0.867, sensitivity=0.867, specificity=0.867). Further, ROC analysis demonstrated strong performance across a range of cutoffs, and little overfitting, with the training AUC (area under the curve)=0.953 and test AUC=0.873.

[1143] Thus, the multivariable model that was built may be used accurately and reliably to triage pelvic tumors and distinguish those that are malignant from those that are benign. Such diagnostic power may be used to reduce the need for invasive testing (e.g., biopsy) prior to treatment can be administered. Further, such diagnostic information can be used to improve treatment recommendations and treatment plans (e.g., earlier treatment in the case of malignant EOC) and reduce indications for unnecessary treatment (e.g., no indication for surgery when the pelvic tumor is benign).

[1144] FIG. 56 is an illustration of a diagram showing the probability distributions for the various groups using the multivariable model for predicting malignancy v. benign status of pelvic tumors in accordance with one or more embodiments. As shown in FIG. 54, the probability distributions for benign pelvic tumor, healthy, missing (undocumented), stage 1 EOC, stage 2 EOC, stage 3 EOC, and stage 4 EOC samples increased with cancer stage, with probability distributions being similar across training and test sets. Notably, applying the built multivariable model to healthy patients, who were not utilized in the training, resulted in few misclassifications and a spread nearly equivalent to that of the benign pelvic tumor cases. Such results indicate that the glycoproteomic signature of the 25 peptide structures for the LASSO regression model solidly predict malignancy and severity of disease.

[1145] Table 49 below provides the fold changes, FDRs, and p-values for the 25 peptide structures PS-169 and PS-175 to PS-198 (same as those in Table 42 above) based on differential expression analysis (DEA). The peptide structures PS-169 and PS-175 to PS-198 are ordered both in Table 42 and in Table 49 with respect to relative significance to the probability score generated by the model. More significant peptide structures had higher coefficients in the LASSO regression model, while less significant peptide structures had lower coefficients in the LASSO regression model. In other words, relative significance to the probability score decreased with decreasing coefficients. Further, each peptide structure is associated with a feature that was used for the model (relab=relative abundance; conc=concentration).

TABLE 49
Peptide Structure Markers for Regression Model to distinguish
between Epithelial Ovarian Cancer and Benign Pelvic Tumor

| | | Benign v. | | | |
|---|---|---|---|---|---|
| | | EOC | Benign v. | | |
| PS-ID | | (Fold | EOC | Benign v. EOC | |
| NO. | PS-NAME | Change) | (FDR) | (p-value) | Feature |
| CK-3 | APOD_98_9800_CHECK | 1.54848 | 4.78e−13 | 8.46e−14 | relab |
| 175 | CO2_621_5200 | 1.36880 | 1.73E−11 | 3.66E−12 | relab |
| 169 | IGG1_297_3410 | 1.54336 | 2.47E−10 | 6.61E−11 | relab |
| 176 | AGP1_93_7612 | 2.39546 | 2.79E−16 | 2.20E−17 | relab |
| 177 | AACT_271_7602 | 1.68006 | 2.27E−08 | 7.70E−09 | conc |
| 178 | A2MG_1424_5402 | 1.15594 | 0.007733584 | 0.005106062 | relab |
| 179 | AACT_271_6513 | 2.34075 | 2.81E−18 | 1.04E−19 | relab |
| 180 | CERU_397_5402 | 1.07300 | 0.008195667 | 0.005425503 | relab |
| 181 | APOB_3411_5301 | 1.01808 | 0.743228938 | 0.714593147 | relab |
| 182 | AACT_106_6513 | 2.11211 | 1.42E−16 | 9.67E−18 | relab |
| 183 | CERU_138_5402 | 1.08927 | 0.002831028 | 0.001760096 | conc |
| 184 | A1AT_107_6513 | 2.15635 | 6.82E−14 | 1.06E−14 | relab |
| 185 | AGP1_93_7602 | 1.11780 | 0.012740002 | 0.008679266 | relab |
| 186 | VTNC_242_6502 | 0.83257 | 0.000446981 | 0.000252845 | relab |
| 187 | IGG2_297_3510 | 0.69463 | 8.28E−10 | 2.36E−10 | conc |
| 188 | CFAH_882_5411 | 0.84102 | 1.06E−05 | 4.78E−06 | relab |
| CK-4 | APOM_135_8500_CHECK | 0.81884 | 1.16e−08 | 3.87e−09 | conc |
| 189 | AGP1_103_8704 | 1.18615 | 0.001152856 | 0.000676369 | relab |
| 190 | IGG1_297_4300 | 0.60088 | 2.09E−11 | 4.47E−12 | relab |
| 191 | APOH_253_5401 | 0.62217 | 1.65E−16 | 1.16E−17 | conc |
| 192 | APOD_98_5411 | 0.71180 | 1.50E−12 | 2.82E−13 | conc |
| 193 | TRFE_630_5411 | 0.69298 | 4.01E−14 | 5.62E−15 | conc |
| 194 | CERU_138_6502 | 0.81476 | 7.13E−07 | 2.87E−07 | relab |
| 195 | A2MG_1424_5411 | 0.67638 | 1.53E−23 | 2.68E−26 | conc |
| 196 | A2MG_55_5411 | 0.71212 | 2.20E−20 | 1.93E−22 | conc |
| 197 | TRFE_630_5412 | 0.77453 | 1.01E−09 | 2.95E−10 | conc |
| 198 | IGG2_297_4511 | 0.73039 | 3.50E−08 | 1.23E−08 | conc |

[1146] Table 50A below provides the fold changes, FDRs, and p-values forthe 36 peptide structures PS-168, PS-172, PS-182, PS-200, PS-201, PS-205, PS-220, PS-226 to PS-254 (same as those in Table 43B above) based on differential expression analysis (DEA). The peptide structures PS-168, PS-172, PS-182, PS-200, PS-201, PS-205, PS-220, PS-226 to PS-254 are ordered in Table 50A with respect to relative significance to the p value score generated by the model.

TABLE 50A
Peptide Structure Markers for Regression Model to
distinguish between late stage (3/4) EOC and early
stage EOC (1/2) using the biomarkers of Table 43B.

| | | Benign v. | | |
|---|---|---|---|---|
| | | EOC | Benign v. | |
| PS-ID | | (Fold | EOC | Benign v. EOC |
| NO. | PS-NAME | Change) | (FDR) | (p-value) |
| 230 | AGP1_103_6513 | 1.539 | 0.0001 | 1.22E−06 |
| 253 | KNG1_294_6503 | 0.817 | 0.0006 | 1.94E−05 |
| 205 | TRFE_630_6513 | 1.361 | 0.001 | 3.71E−05 |
| 249 | HPT_207_11915 | 1.469 | 0.0011 | 4.62E−05 |
| 232 | AGP1_103_7614 | 1.425 | 0.0011 | 5.35E−05 |
| 172 | HPT_207_121005 | 0.736 | 0.0013 | 7.32E−05 |
| 247 | HPT_184_6513 | 1.575 | 0.002 | 0.0001 |
| 250 | HPT_241_6513 | 1.64 | 0.0022 | 0.0002 |
| 253 | KNG1_205_6513 | 1.512 | 0.0028 | 0.0002 |
| 235 | AGP1_93_7613 | 1.436 | 0.0031 | 0.0003 |
| 236 | AGP12_56_6503 | 0.78 | 0.0031 | 0.0003 |
| 238 | AGP12_72_6503 | 0.759 | 0.0034 | 0.0003 |
| 245 | HEMO_187_6503 | 0.861 | 0.0034 | 0.0003 |
| 241 | APOH_162_6503 | 0.799 | 0.0035 | 0.0003 |
| 251 | HPT_241_7613 | 1.58 | 0.0039 | 0.0004 |
| 235 | AGP1_93_6513 | 1.398 | 0.0039 | 0.0004 |
| 243 | CERU_762_6513 | 1.19 | 0.0039 | 0.0004 |
| 201 | AGP1_93_7614 | 1.327 | 0.0039 | 0.0004 |
| 226 | AACT_106_6503 | 0.749 | 0.0045 | 0.0005 |
| 229 | AGP1_103_6503 | 0.792 | 0.0045 | 0.0006 |
| 244 | FETUA_156_6503 | 0.837 | 0.0045 | 0.0006 |
| 228 | AACT_271_6502 | 0.688 | 0.0046 | 0.0006 |
| 254 | VTNC_242_6503 | 0.836 | 0.0049 | 0.0007 |
| 231 | AGP1_103_7602 | 0.767 | 0.0049 | 0.0007 |
| 220 | AACT_106_7614 | 1.379 | 0.0051 | 0.0007 |
| 240 | AGP2_103_6513 | 1.438 | 0.0053 | 0.0008 |
| 227 | AACT_106_7604 | 0.794 | 0.0056 | 0.0009 |
| 237 | AGP12_56_6513 | 1.426 | 0.0065 | 0.001 |
| 182 | AACT_106_6513 | 1.336 | 0.0096 | 0.0017 |
| 246 | HEMO_187_6513 | 1.232 | 0.0107 | 0.002 |
| 233 | AGP1_93_6503 | 0.796 | 0.0112 | 0.0022 |
| 200 | FETUA_176_6513 | 1.394 | 0.0123 | 0.0025 |
| 168 | CERU_138_6513 | 1.143 | 0.0253 | 0.0066 |
| 239 | AGP12_72_7603 | 0.835 | 0.0259 | 0.0069 |
| 242 | CERU_397_6513 | 1.225 | 0.0375 | 0.0113 |
| 248 | HPT_207_11904 | 0.865 | 0.0386 | 0.0117 |

Table 50B below provides the fold changes, FDRs, and p-values for the 25 peptide structures denoted by SEQ ID NO 475-499 (in accordance with Table 43C above) using differential expression analysis (DEA).

TABLE 50B
Peptide Structure Markers for Regression Model to distinguish between late stage
(3/4) EOC and early stage EOC (1/2) using the biomarkers of Table 43C.

| | | stage 3, 4 vs | stage 3, 4 vs | stage 3, 4 vs |
|---|---|---|---|---|
| SEQ ID | | stage 1, 2 | stage 1, 2 | stage 1, 2 |
| NO | PS-NAME | (fold_change) | (FDR) | (p-value) |
| 475 | AACT_271_6512 | 0.704 | 0.0028 | 0.0002 |
| 476 | AGP1_103_6503 | 0.792 | 0.0045 | 0.0006 |
| 477 | AGP1_103_6513 | 1.539 | 0.0001 | 1.22E−06 |
| 478 | AGP1_103_7614 | 1.425 | 0.0011 | 5.35E−05 |
| 479 | AGP1_93_6513 | 1.398 | 0.0039 | 0.0004 |
| 480 | AGP1_93_7604 | 1.471 | 0.001 | 3.94E−05 |
| 481 | AGP1_93_7613 | 1.436 | 0.0031 | 0.0003 |
| 482 | AGP1_93_7614 | 1.327 | 0.0039 | 0.0004 |
| 483 | AGP12_56_6503 | 0.78 | 0.0031 | 0.0003 |
| 484 | AGP12_72_6503 | 0.759 | 0.0034 | 0.0003 |
| 485 | AGP12_72_7604 | 1.546 | 0.0012 | 6.85E−05 |
| 486 | AGP12_72MC_7604 | 1.592 | 0.0013 | 8.30E−05 |
| 487 | AGP12_72MC_7614 | 1.464 | 0.002 | 0.0001 |
| 488 | APOH_162_6503 | 0.799 | 0.0035 | 0.0003 |
| 489 | CERU_762_6513 | 1.19 | 0.0039 | 0.0004 |
| 490 | HEMO_187_6503 | 0.861 | 0.0034 | 0.0003 |
| 491 | HPT_184_6513 | 1.575 | 0.002 | 0.0001 |
| 492 | HPT_207_11915 | 1.469 | 0.0011 | 4.62E−05 |
| 493 | HPT_207_121005 | 0.736 | 0.0013 | 7.32E−05 |
| 494 | HPT_241_6503 | 1.607 | 0.001 | 4.78E−05 |
| 495 | HPT_241_6513 | 1.64 | 0.0022 | 0.0002 |
| 496 | HPT_241_7613 | 1.58 | 0.0039 | 0.0004 |
| 497 | KNG1_205_6513 | 1.512 | 0.0028 | 0.0002 |
| 498 | KNG1_294_6503 | 0.817 | 0.0006 | 1.94E−05 |
| 499 | TRFE_630_6513 | 1.361 | 0.001 | 3.71E−05 |

Table 50C below provides the fold changes, FDRs, and p-values for the 50 peptide structures denoted by SEQ ID NO 500-549 (in accordance with Table 43D above) using differential expression analysis (DEA). For this differential expression analysis, the subjects from EOC stages 1-4 were used for this analysis as shown in the table of FIG. 50. EOC stages 1 and 2 (12+6) were combined to be the early stage cohort and EOC stages 3 and 4 (68+12) were combined to be the late stage cohort.

TABLE 50C
Peptide Structure Markers for Regression Model to distinguish between late stage
(3/4) EOC and early stage EOC (1/2) using the biomarkers of Table 43D.

| | | stage 3, 4 vs | stage 3, 4 vs | stage 3, 4 vs |
|---|---|---|---|---|
| SEQ ID | | stage 1, 2 | stage 1, 2 | stage 1, 2 |
| NO | PS-Name | (fold_change) | (FDR) | (p-value) |
| 500 | A1AT_107_6512 | 1.319 | 0.294 | 0.454 |
| 501 | A2MG_1424_6501 | 1.248 | 0.129 | 0.274 |
| 502 | A2MG_1424_6511 | 1.025 | 0.776 | 0.868 |
| 503 | AACT_106_6503 | 0.739 | 0.035 | 0.132 |
| 504 | AACT_106_7604 | 0.789 | 0.040 | 0.148 |
| 505 | AACT_106_7614 | 1.319 | 013 | 0.076 |
| 506 | AACT_271_6502 | 0.587 | 0.004 | 0.056 |
| 507 | AACT_271_6503 | 0.663 | 0.013 | 0.076 |
| 508 | AGP12_56_6503 | 0.746 | 0.005 | 0.059 |
| 509 | AGP12_72MC_6503 | 0.841 | 0.099 | 0.239 |
| 510 | AGP12_72MC_6513 | 1.389 | 0.003 | 0.054 |
| 511 | AGP12_72MC_7613 | 1.561 | 0.001 | 0.035 |
| 512 | AGP12_72MC_7614 | 1.669 | 0.001 | 0.035 |
| 513 | AGP12_72_6503 | 0.685 | 0.005 | 0.061 |
| 514 | AGP12_72_7603 | 0.769 | 0.027 | 0.115 |
| 515 | AGP12_72_7604 | 0.835 | 0.083 | 0.22 |
| 516 | AGP1_103_6503 | 0.838 | 0.125 | 0.269 |
| 517 | AGP1_103_6513 | 1.481 | <0.001 | 0.013 |
| 518 | AGP1_103_7602 | 0.705 | 0.013 | 0.076 |
| 519 | AGP1_103_7604 | 0.866 | 0.245 | 0.408 |
| 520 | AGP1_103_7614 | 1.386 | <0.001 | 0.013 |
| 521 | AGP1_93_6503 | 0.828 | 0.125 | 0.269 |
| 522 | AGP1_93_7602 | 0.854 | 0.182 | 0.3417 |
| 523 | AGP1_93_7603 | 0.887 | 0.243 | 0.404 |
| 524 | AGP1_93_7604 | 0.951 | 0.624 | 0.761 |
| 525 | AGP1_93_7612 | 1.293 | 0.031 | 0.126 |
| 526 | AGP1_93_7613 | 1.417 | 0.001 | 0.03 |
| 527 | AGP1_93_7614 | 1.508 | <0.001 | 0.015 |
| 528 | AGP2_103_6503 | 0.805 | 0.094 | 0.232 |
| 529 | AGP2_103_6513 | 1.386 | <0.001 | 0.015 |
| 530 | AGP2_103_7604 | 0.836 | 0.173 | 0.334 |
| 531 | APOH_162_6503 | 0.856 | 0.099 | 0.239 |
| 532 | APOH_253_5412 | 1.278 | 0.0185 | 0.093 |
| 533 | CERU_397_6513 | 1.323 | 0.012 | 0.076 |
| 534 | CERU_762_6503 | 0.814 | 0.019 | 0.095 |
| 535 | FETUA_156_6503 | 0.856 | 0.043 | 0.155 |
| 536 | FETUA_156_6513 | 1.155 | 0.222 | 0.387 |
| 537 | FETUA_176_6513 | 1.358 | 0.088 | 0.228 |
| 538 | HEMO_187_6503 | 0.882 | 0.056 | 0.175 |
| 539 | HEMO_187_6513 | 1.214 | 0.044 | 0.155 |
| 540 | HPT_184_6513 | 1.50 | 0.032 | 0.130 |
| 541 | HPT_207_11904 | 0.812 | 0.038 | 0.141 |
| 542 | HPT_207_11914 | 1.253 | 0.0128 | 0.076 |
| 543 | HPT_207_11915 | 1.55 | <0.001 | 0.015 |
| 544 | HPT_207_121005 | 0.742 | 0.0136 | 0.077 |
| 545 | HPT_241_6511 | 1.217 | 0.171 | 0.33 |
| 546 | HPT_241_6512 | 1.595 | 0.01 | 0.07 |
| 547 | HPT_241_6513 | 1.629 | 0.007 | 0.065 |
| 548 | HPT_241_7613 | 1.506 | 0.053 | 0.172 |
| 549 | KNG1_294_6503 | 0.8 | 0.003 | 0.054 |

[1147] The markers from Table 43B were used to train a regularized regression model (e.g., LASSO regression model). Coefficients for the regularized regression model (e.g., LASSO regression model) are provided in Table 51A. Using the values of Table 51A, a probability for one of the states can be determined by summing together the product of the concentration of each biomarker in the sample and the respective coefficient (of one column) and then adding the summation and the intercept to yield the logit of a probability score. For example, the logit of the probability, to which the inverse logit function can be applied, is equal to the following equation 1 (eq. 1).

$${\sum }_{i = 1}^{i = n} [ ( {Concentration}_{PS - ID NO : i} ) \times ( {Coefficient}_{PS - ID NO : i} ) ] + Intercept \\ where n = a number of biomarkers having a unique PS - ID No , \\ i = an index number for each of the biomarkers , \qquad ( eq . 1 )$$

TABLE 51A
Coefficients for Peptide Structure Markers for a Regression
Model to distinguish between late stage (3/4) EOC and early
stage EOC (1/2) based on the biomarkers of Table 43B

| | | Coefficients |
|---|---|---|
| | | (stage 3, 4 vs stage |
| PS-ID No | PS-NAME | 1, 2) |
| 226 | AACT_106_6503 | 0.789963 |
| 182 | AACT_106_6513 | −0.100283 |
| 227 | AACT_106_7604 | −0.23972 |
| 220 | AACT_106_7614 | −0.174242 |
| 228 | AACT_271_6502 | −1.019336 |
| 229 | AGP1_103_6503 | −1.129647 |
| 230 | AGP1_103_6513 | 2.450196 |
| 231 | AGP1_103_7602 | −0.826335 |
| 232 | AGP1_103_7614 | 0.342801 |
| 233 | AGP1_93_6503 | 0.888268 |
| 234 | AGP1_93_6513 | −1.638508 |
| 235 | AGP1_93_7613 | −0.120831 |
| 201 | AGP1_93_7614 | −0.94578 |
| 236 | AGP12_56_6503 | −0.211526 |
| 237 | AGP12_56_6513 | 0.105946 |
| 238 | AGP12_72_6503 | −1.586863 |
| 239 | AGP12_72_7603 | 0.544458 |
| 240 | AGP2_103_6513 | −0.132156 |
| 241 | APOH_162_6503 | 0.465722 |
| 168 | CERU_138_6513 | |
| 242 | CERU_397_6513 | −1.056969 |
| 243 | CERU_762_6513 | 1.538329 |
| 244 | FETUA_156_6503 | −0.478039 |
| 200 | FETUA_176_6513 | 0.343385 |
| 245 | HEMO_187_6503 | −0.012419 |
| 246 | HEMO_187_6513 | −2.077228 |
| 247 | HPT_184_6513 | 1.018212 |
| 248 | HPT_207_11904 | 0.950984 |
| 249 | HPT_207_11915 | 1.289189 |
| 172 | HPT_207_121005 | −0.387854 |
| 250 | HPT_241_6513 | −0.890611 |
| 251 | HPT_241_7613 | 0.311607 |
| 252 | KNG1_205_6513 | 0.287132 |
| 253 | KNG1_294_6503 | 0.188466 |
| 205 | TRFE_630_6513 | −0.19935 |
| 254 | VTNC_242_6503 | −0.11461 |

[1148] The markers from Table 43C were used to train a regularized regression model (e.g., LASSO regression model). Coefficients for the regularized regression model (e.g., LASSO regression model) are provided in Table 51B. Using the values of Table 51B, a probability for one of the states can be determined by summing together the product of the concentration of each biomarker in the sample and the respective coefficient (of one column) and then adding the summation and the intercept to yield the logit of a probability score (see equation 1).

TABLE 51B
Coefficients for Peptide Structure Markers for a Regression
Model to distinguish between late stage (3/4) EOC and early
stage EOC (1/2) based on the biomarkers of Table 43C.

| SEQ | | |
|---|---|---|
| ID NO | PS-NAME | Coefficients |
| 475 | AACT_271_6512 | 0.267422 |
| 476 | AGP1_103_6503 | −0.44212 |
| 477 | AGP1_103_6513 | 1.735177 |
| 478 | AGP1_103_7614 | 0.240767 |
| 479 | AGP1_93_6513 | −1.34581 |
| 480 | AGP1_93_7604 | 0.346537 |
| 481 | AGP1_93_7613 | −0.33861 |
| 482 | AGP1_93_7614 | −1.4923 |
| 483 | AGP12_56_6503 | −0.75867 |
| 484 | AGP12_72_6503 | −0.57017 |
| 485 | AGP12_72_7604 | 0.214311 |
| 486 | AGP12_72MC_7604 | −0.42256 |
| 487 | AGP12_72MC_7614 | 0.675864 |
| 488 | APOH_162_6503 | 0.124674 |
| 489 | CERU_762_6513 | 0.180667 |
| 490 | HEMO_187_6503 | −0.35174 |
| 491 | HPT_184_6513 | 0.895905 |
| 492 | HPT_207_11915 | 0.362611 |
| 493 | HPT_207_121005 | −0.17095 |
| 494 | HPT_241_6503 | 0.26564 |
| 495 | HPT_241_6513 | −2.44213 |
| 496 | HPT_241_7613 | −0.0651 |
| 497 | KNG1_205_6513 | 0.318803 |
| 498 | KNG1_294_6503 | −0.02677 |
| 499 | TRFE_630_6513 | 0.782865 |

[1149] Using the model coefficients of Table 51B, a predicted probability was generated for early stage and late stage ovarian cancer samples showing a stratification in predicted probabilities between the two cohorts as is illustrated in FIG. 58. FIG. 59 illustrates a receiver-operating-characteristic (ROC) curve and the area under curve (AUC) for the regularized regression model (e.g., LASSO regression model) for early stage and late stage ovarian cancer samples using testing case data and training case data. Table 52 shows the accuracy, sensitivity, specificity and precision for the training data set and the testing data set.

Table 53 shows the training accuracy and testing accuracy for the early stage and late stage cohort for ovarian cancer.

TABLE 52

| | Train | Test |
|---|---|---|
| Accuracy | 0.753 | 0.778 |
| Sensitivity | 0.802 | 0.864 |
| Specificity | 0.7 | 0.714 |
| Precision | 0.712 | 0.769 |

TABLE 53

| | Train | Test |
|---|---|---|
| | (accuracy) | (accuracy) |
| Early Stage | 0.7 | 0.714286 |
| Late Stage | 0.802326 | 0.863636 |

[1150] The markers from Table 43D were used to train a regularized regression model (e.g., LASSO regression model). Coefficients for the regularized regression model (e.g., LASSO regression model) are provided in Table 51C. Using the values of Table 51C, a probability for one of the states can be determined by summing together the product of the concentration of each biomarker in the sample and the respective coefficient (of one column) and then adding the summation and the intercept to yield the logit of a probability score (see equation 1).

TABLE 51C
Coefficients for Peptide Structure Markers for a Regression
Model to distinguish between late stage (3/4) EOC and early
stage EOC (1/2) based on the biomarkers of Table 43D.

| SEQ | | |
|---|---|---|
| ID NO | PS-Name | Coefficients |
| 500 | A1AT_107_6512 | 0 |
| 501 | A2MG_1424_6501 | 0 |
| 502 | A2MG_1424_6511 | 0 |
| 503 | AACT_106_6503 | 0 |
| 504 | AACT_106_7604 | −0.0022402 |
| 505 | AACT_106_7614 | −0.652235354 |
| 506 | AACT_271_6502 | −0.680231822 |
| 507 | AACT_271_6503 | −1.169551 |
| 508 | AGP12_56_6503 | −2.2045339 |
| 509 | AGP12_72MC_6503 | 0.56949569 |
| 510 | AGP12_72MC_6513 | 0 |
| 511 | AGP12_72MC_7613 | −2.2203046 |
| 512 | AGP12_72MC_7614 | 0 |
| 513 | AGP12_72_6503 | −1.5094621 |
| 514 | AGP12_72_7603 | 0.91786725 |
| 515 | AGP12_72_7604 | 0 |
| 516 | AGP1_103_6503 | 0 |
| 517 | AGP1_103_6513 | 1.51746308 |
| 518 | AGP1_103_7602 | 0 |
| 519 | AGP1_103_7604 | 0 |
| 520 | AGP1_103_7614 | 0 |
| 521 | AGP1_93_6503 | 0 |
| 522 | AGP1_93_7602 | 0.05936161 |
| 523 | AGP1_93_7603 | 1.69720204 |
| 524 | AGP1_93_7604 | 0 |
| 525 | AGP1_93_7612 | 0 |
| 526 | AGP1_93_7613 | 0 |
| 527 | AGP1_93_7614 | 0 |
| 528 | AGP2_103_6503 | 0 |
| 529 | AGP2_103_6513 | 0.15270371 |
| 530 | AGP2_103_7604 | 0 |
| 531 | APOH_162_6503 | 0 |
| 532 | APOH_253_5412 | 0.84222935 |
| 533 | CERU_397_6513 | 0.07304956 |
| 534 | CERU_762_6503 | −0.106671 |
| 535 | FETUA_156_6503 | 0.50770712 |
| 536 | FETUA_156_6513 | −1.2528564 |
| 537 | FETUA_176_6513 | 0 |
| 538 | HEMO_187_6503 | 0 |
| 539 | HEMO_187_6513 | 0 |
| 540 | HPT_184_6513 | 0.25532311 |
| 541 | HPT_207_11904 | 0 |
| 542 | HPT_207_11914 | 0 |
| 543 | HPT_207_11915 | 0 |
| 544 | HPT_207_121005 | 0 |
| 545 | HPT_241_6511 | 0.50726531 |
| 546 | HPT_241_6512 | 0 |
| 547 | HPT_241_6513 | 0 |
| 548 | HPT_241_7613 | 0 |
| 549 | KNG1_294_6503 | 0 |

[1151] Using the model coefficients of Table 51C, a predicted probability was generated for early stage and late stage ovarian cancer samples showing a stratification in predicted probabilities between the two cohorts as is illustrated in FIG. 62. In various embodiments, predicted probability can be generated for classifying early stage and late stage ovarian cancer samples using the markers with non-zero coefficients such as SEQ ID NO's 504-509, 511, 513, 514, 517, 522, 523, 529, 532-536, 540, and 545. A logistic regression model was used with the glycopeptides of Table 43D where the glycopeptides had 1 or more sialic acids and zero or more fucosylations for the early and late stage EOC cohorts. The glycopeptides that included fucose were found to be associated with EOC. In addition, glycopeptides that included fucose and also carrying tri- and tetra-antennary glycan structure were found to be more strongly associated with EOC. For example, FIGS. 63A to 63E show that the relative abundance of tri- and tetra-antennary glycan structures in benign tumors, early-stage EOC and late-stage EOC showed an increase with the progression of the EOC disease. The numbers 6512, 6512, 7612, 7613, 7614 correspond to the five distinct glycans attached to the glycopeptides. Referring back to FIGS. 63A to 63C, the three leftmost bar graphs represent glycopeptides with tetra-antennary glycans with varying degrees of sialylation. The two rightmost bar graphs are FIGS. 63D and 63E and they represent glycopeptides with tri-antennary glycans with two or three sialic acids. The asterisk(s) in FIGS. 63A and 63E represent the following—* p-value<=0.05, ** p-value<=0.01, *** p-value<=0.001, and **** p-value<=0.0001). It should be noted that the horizontal bars on FIGS. 63A to 63E are used to show the statistical comparisons between the benign and late-stage cohorts (highest horizontal bar), early-stage and late-stage cohorts (middle horizontal bar), and the benign and early-stage cohorts (lowest horizontal bar),

[1152] Table 54 shows the accuracy, sensitivity, and specificity for the training data set and the testing data set.

TABLE 54

| | Train | Test |
|---|---|---|
| Accuracy | 0.963 | 0.8 |
| Sensitivity | 1 | 0.824 |
| Specificity | 0.812 | 0.667 |

### I.B. Exemplary Retrospective & Prospective Analysis

[1153] A validation study was conducted using both retrospective patient samples and samples collected prospectively in the ongoing Clinical Validation of the InterVenn Ovarian CAncer Liquid Biopsy (VOCAL) study. Samples included those from patients with malignant EOC and patients with benign pelvic tumors. Samples were processed in a manner similar to the manner described for the Exemplary Retrospective Analysis.

[1154] A logistic regression model was built identifying a panel of 38 peptide structures (same as those in Table 43A above). This panel of 38 peptide structures had an overall predictive accuracy of over 86% for the prediction of malignancy versus benign status of pelvic tumors.

[1155] Table 50A below provides the fold changes and p-values for the 38 peptide structures also identified in Table 43A above based on differential expression analysis (DEA). These peptide structures are ordered both in Table 43A and in Table 50A with respect to relative significance to the probability score generated by the model based on p-values. In this context, more significant peptide structures have lower p-values, while less significant peptide structures have higher p-values. In other words, relative significance to the probability score decreased with increasing p-values.

### II. Representative Experimental Results—Melanoma

### Samples:

[1156] Sample data via glycoproteomic analysis of pretreatment blood samples was compiled for a sample population comprising advanced malignant melanoma patients treated with pembrolizumab (Pembro; n=24) or nivolumab-ipilimumab (ipi/nivo; n=11). Samples were analyzed using an advanced glycoproteomics platform that combines ultra-high-performance liquid chromatography coupled to triple quadrupole mass spectrometry and a neural-network-based data processing engine. Individual glycopeptide signatures derived from 67 abundant serum proteins were analyzed and correlated with treatment, progression-free survival (PFS, and other clinical outcome metrics).

### Analysis:

[1157] Two response groups were defined based on PFS: early disruption (e.g., early failure) (EF; PFS event within 6 months) and sustained control (SC; no events for ≥12 months). Differential relative/absolute abundances for 498 serum glycopeptides and aglycosylated peptides were calculated between SC and EF patients for each treatment group to determine a set of peptide structures more abundant in each SC versus EF by treatment group. A score was developed for each treatment group based on the 20 markers within each treatment group identified as the most statistically significant ones based on one-sided Wilcoxon test comparing EF and SC. For a given patient, the score was computed as the proportion of glycopeptides/aglycosylated peptides with relative/absolute abundance exceeding their median abundance. A low score was associated with high risk for early failure.

[1158] Table 64 and Table 65 below show the median abundances identified for the set of peptide structures. These median abundances are examples of what may be used as reference abundances for these peptide structures.

TABLE 64
Median Abundances for Peptide Structures associated with Pembro

| | Peptide | |
|---|---|---|
| PS- | Structure | Median |
| ID NO. | (PS) NAME | Abundance |
| 330 | IGG1_297_5400 | 0.1044605 |
| 331 | IGG2_297_5411 | 0.1214551 |
| 332 | IGG1_297_5510 | 0.1032259 |
| 333 | IGG2_297_5410 | 0.0993292 |
| 334 | IGG1_297_5410 | 0.0525704 |
| 335 | IGG2_297_4411 | −0.0737209 |
| 336 | THBG_36_5402 | 0.1421563 |
| 337 | IGG2_297_5510 | 0.1248705 |
| 338 | AGP1_33_6503 | 0.3600423 |
| 339 | CO8B_243_6610 | 0.1909322 |
| 340 | IGA12_144_5502 | −0.1191828 |
| 341 | KLKB1_494_5410 | 0.0492207 |
| 342 | IGG1_297_4400 | 0.1883168 |
| 343 | AACT_271_7602 | 0.0923715 |
| 344 | CO8B_553_5410 | −0.014819 |
| 345 | FETUA_156_5402.5421 | −0.2216863 |
| 346 | IGA12_144_5501 | 0.0029389 |
| 347 | IGG2_297_4500 | 0.0712961 |
| 348 | AGP1_33_6502 | 0.0921509 |
| 349 | CLUS_374_6520.6501 | 0.0556276 |

TABLE 65
Median Abundances for Peptide Structures
associated with Ipi/Nivo

| PS- | Peptide | |
|---|---|---|
| ID | Structure | Median |
| NO. | (PS) NAME | Abundance |
| 350 | A2MG_869_5200 | 0.0754619 |
| 338 | AGP1_33_6503 | 0.3600423 |
| 351 | CFAH_882_5420.5401 | 0.1460826 |
| 352 | CFAH_911_5420.5401 | 0.1281516 |
| 353 | HEMO_453_5420.5401 | 0.2013525 |
| 354 | IGG34_297_4410 | 0.2134462 |
| 355 | KLKB1_127_5410 | −0.0022041 |
| 356 | TRFE_432_5401 | −0.0482695 |
| 357 | QUANTPEP.IGG4_ | 0.0439244 |
| | TTPPVLDSDGSFFLYSR | |
| 358 | NEWQUANTPEP- | −0.0280153 |
| | IGG3_ | |
| | TPEVTCVVVDVSHEDPEVQFK | |
| 359 | A2MG_869_6200 | −0.0430135 |
| 360 | HPT_184_5511 | −0.2843536 |
| 361 | VTNC_169_5401 | −0.0248306 |
| 362 | AACT_271_7603 | 0.1237403 |
| 363 | HPT_207_10803 | 0.0825476 |
| 364 | HPT_241_5401.5420 | −0.0008547 |
| 365 | IGG34_297_4411 | 0.2102183 |
| 366 | ITIH4_517_5420.5401 | 0.0750044 |
| 341 | KLKB1_494_5410 | 0.0492207 |
| 367 | AACT_127_5401 | 0.0715 |

### Results:

[1159] When examined in all patients in the cohort (regardless of treatment), both treatment scores isolated EF from SC. Algorithmic assignment was performed by choosing the treatment with the highest treatment-specific score (e.g., if ipi/nivo score >pembro score, then assign to ipi/nivo). PFS was superior for cases where the assigned treatment matched the treatment received. Log-rank p-values comparing PFS by assigned treatment within pembro- and ipi/nivo-treated cases were 0.009 and 0.0004, respectively. Our results show that serum glycoproteomic analysis allows targeted treatment assignment not only to immune checkpoint inhibitor treatment in general, but specifically to the most likely successful agent among different drugs for melanoma. This may fundamentally improve the clinical use of immuno-therapy in subjects with melanoma.

[1160] FIG. 68 is a plot showing the distribution of the treatment scores generated for those patients who were treated with pembro in accordance with one or more embodiments.

[1161] FIG. 69 is a plot showing the distribution of the treatment scores generated for those patients who were treated with ipi/nivo in accordance with one or more embodiments.

[1162] FIG. 70 is a scatterplot showing the treatment scores by treatment type in accordance with one or more embodiments.

[1163] FIG. 71 is a plot showing disruption event times for patients treated with pembro by their predicted response.

[1164] FIG. 72 is a plot showing disruption event times for patients treated with ipi/nivo by their predicted response.

### 2. Biomarkers for Determining Immuno-Oncologyresponse

[1165] Provided herein are methods, devices, glycopeptides, and kits for identifying glycoproteomic biomarkers and signatures for risk of having a disease or a condition, progression of the disease or condition, and response of the disease or condition to a treatment, such as treatment with immune checkpoint blockade for cancer. In some cases, the disease or condition may be cancer. In some cases, the progression of the disease or condition includes but is not limited to stage of cancer or size of tumor or a surrogate endpoint. Such information may be used to provide actionable recommendations for treatment to a healthcare provider, including but not limited to initiation of a new treatment, continuation of ongoing treatment, adding a new therapy, or changing the dosage and/or frequency of ongoing treatment.

[1166] Protein glycosylation is one of the abundant and most complex form of post-translational protein modification. Glycosylation profoundly can affect structure, conformation, and function of a polypeptide. The elucidation of the potential role of differential polypeptide glycosylation as biomarkers has so far been limited by the technical complexity of generating and interpreting this information. A novel, powerful platform has been established that combines ultra-high-performance liquid chromatography (LC) coupled to triple quadrupole mass spectrometry (MS) with a machine-learning and neural-network-based data processing engine that allows for high-throughput, highly scalable interrogation of the glycoproteome. The glycoproteomic biomarkers and signatures may be used to predict which cancer patients may respond to immune checkpoint blockade treatment, such as PD1/PDL1 checkpoint inhibitors.

[1167] Changes in glycosylation have been described in relationship to disease states such as cancer. See, e.g., Dube, D. H.; Bertozzi, C. R. Glycans in Cancer and Inflammation—Potential for Therapeutics and Diagnostics. Nature Rev. Drug Disc. 2005, 4, 477-88, the entire contents of which are herein incorporated by reference in its entirety for all purposes. However, clinically relevant, non-invasive assays for diagnosing cancer in a patient based on glycosylation changes in a sample from that patient are still needed.

[1168] Mass spectroscopy (MS) offers sensitive and precise measurement of cancer-specific biomarkers including glycopeptides. See, for example, Ruhaak, L. R., et al., Protein-Specific Differential Glycosylation of Immunoglobulins in Serum of Ovarian Cancer Patients DOI: 10.1021/acs.jproteome.5b01071; J. Proteome Res., 2016, 15, 1002-1010 (2016); also Miyamoto, S., et al., Multiple Reaction Monitoring for the Quantitation of Serum Protein Glycosylation Profiles: Application to Ovarian Cancer, DOI: 10.1021/acs.jproteome.7b00541, J. Proteome Res. 2018, 17, 222-233 (2017), the entire contents of which are herein incorporated by reference in its entirety for all purposes. However, using MS to diagnose cancer has not been demonstrated to date in a clinically relevant manner. What is needed are new biomarkers and new methods of using MS to assess a diagnosis for a disease or a condition, a risk of having a disease or a condition, progression of the disease or condition, and response of the disease or condition to a treatment.

### I. Overview

[1169] Provided herein are methods for identifying one or more glycopeptide biomarkers predictive of a disease or a condition in a subject, the method comprising: (a) obtaining from a subject a first sample at a first timepoint and a second sample at a second timepoint, wherein the first sample and the second sample comprise a glycoprotein; (b) fragmenting the glycoprotein in the first sample or the second sample into one or more glycopeptides, wherein the one or more glycopeptides comprise one or more amino acid sequences selected from a group consisting of SEQ ID NO: 673-703, 731-779, and 570-595, and combinations thereof, (c) determining an amount of the one or more glycopeptides using multiple reaction monitoring mass spectrometry (MRM-MS); (d) associating the amount of the one or more glycopeptides with the first timepoint or the second timepoint, wherein the subject has a change in a disease or a condition from the first timepoint to the second timepoint; and (e) identifying as glycopeptide biomarkers the glycopeptide where the amount of the one or more glycopeptides changed from the first timepoint to the second timepoint.

[1170] Described herein are methods for identifying one or more glycopeptide biomarkers predictive of a disease or a condition in a subject, the method comprising: (a) obtaining, by a computer, data of an amount of one or more glycopeptides for a set (n) of subjects, wherein the one or more glycopeptides are generated by fragmenting a glycoprotein in a sample from a subject, the amount of one or more glycopeptides are determined using multiple reaction monitoring mass spectrometry (MRM-MS), and the data for each subject comprises data from samples taken at a plurality of timepoints; (b) selecting, by the computer, a subset of the one or more glycopeptides to include in a predictive model; (c) assessing, by the computer, the predictive model using a cross-validation with n-1 subjects to generate an outcome score for a holdout subject; (d) iterating, by the computer, step (c) for each of n subjects as the holdout subject to generate an outcome score for each subject; (e) dichotomizing, by the computer, the outcome scores for each subject at a cutoff outcome score as below or above the cutoff outcome score; (f) analyzing, by the computer, the amount of one or more glycopeptides for subjects having outcome scores above the cutoff outcome score to the amount of one or more glycopeptides for subjects having outcome scores below the cutoff outcome score for each glycopeptide in the subset of the one or more glycopeptides to determine a hazard ratio and an interaction p-value for each glycopeptide; (g) identifying, by the computer, the glycopeptide having the interaction p-value <0.05 as a glycopeptide biomarker for predicting the disease or the condition. In some embodiments, the cross-validation is leave-one-out cross-validation (LOOCV). In some embodiments, the cutoff outcome score was determined to optimize Harrell's C-index. In some embodiments, the interaction p-value is less than or equal to 0.01, 0.005, or 0.001 in step (g).

[1171] Provided herein are method for identifying one or more glycopeptide biomarkers predictive of a disease or a condition in a subject, the method comprising: (a) obtaining, by a computer, data of an amount of one or more glycopeptides for a set (n) of subjects, wherein the one or more glycopeptides are generated by fragmenting a glycoprotein in a sample from a subject, the amount of one or more glycopeptides are determined using multiple reaction monitoring mass spectrometry (MRM-MS), and the data for each subject comprises data from samples taken at a plurality of timepoints; (b) selecting, by the computer, a subset of the one or more glycopeptides to include in a predictive model; (c) assessing, by the computer, the predictive model using a cross-validation with n-1 subjects to generate an outcome score for a holdout subject; (d) iterating, by the computer, step (c) for each of n subjects as the holdout subject to generate an outcome score for each subject; (e) dichotomizing, by the computer, the outcome scores for each subject at a cutoff outcome score as below or above the cutoff outcome score; (f) analyzing, by the computer, the amount of one or more glycopeptides for subjects having outcome scores above the cutoff outcome score to the amount of one or more glycopeptides for subjects having outcome scores below the cutoff outcome score for each glycopeptide in the subset of the one or more glycopeptides to determine a hazard ratio and an interaction p-value for each glycopeptide; (g) identifying, by the computer, the glycopeptide having the interaction p-value ≤0.05 as a glycopeptide biomarker for predicting the disease or the condition.

[1172] Described herein are methods for assessing a status of a condition and a treatment in a subject, the method comprising: (a) fragmenting a glycoprotein in a sample from a subject into one or more glycopeptides, wherein the sample comprises one or more of glycoproteins, glycans, or glycopeptides; (b) performing mass spectroscopy (MS) on the one or more glycopeptides using multiple reaction monitoring mass spectrometry (MRM-MS) to quantify an amount of the one or more glycopeptides in the sample, wherein the one or more glycopeptides comprise one or more amino acid sequences selected from a group consisting of SEQ ID NOs: 673-703, 731-779, and 570-595, and combinations thereof, (c) inputting data of the amount of the one or more glycopeptides into a trained model to generate an output probability, wherein the output probability is indicative of whether a treatment positively influences an outcome of the subject having a condition; and (d) generating a treatment recommendation based on the output probability, wherein the condition is melanoma and the treatment comprises checkpoint inhibitors. In some embodiments, the outcome comprises overall survival time. In some embodiments, the outcome comprises progression-free survival time. In some embodiments, the treatment comprises one or more of ipilimumab, nivolumab, and pembrolizumab. In some embodiments, the treatment comprises one or more of PD-1-, PD-L1-, and CTLA-4-inhibitors. In some embodiments, the treatment comprises chemotherapy. In some embodiments, the chemotherapy comprises one or more of carboplatin and pemetrexed. In some embodiments, the recommendation comprises continuing the treatment if the output probability indicates the treatment positively influences the outcome.

[1173] Provided herein are methods for assessing a status of a condition and a treatment in a subject, the method comprising: (a) fragmenting a glycoprotein in a sample from a subject into one or more glycopeptides, wherein the sample comprises one or more of glycoproteins, glycans, or glycopeptides; (b) performing mass spectroscopy (MS) on the one or more glycopeptides using multiple reaction monitoring mass spectrometry (MRM-MS) to quantify an amount of the one or more glycopeptides in the sample, wherein the one or more glycopeptides comprise one or more amino acid sequences selected from a group consisting of SEQ ID NOs: 673-703, 731-779, and 570-595, and combinations thereof, (c) inputting data of the amount of the one or more glycopeptides into a trained model to generate an output probability, wherein the output probability is indicative of whether a treatment positively influences an outcome of the subject having a condition; and (d) generating a treatment recommendation based on the output probability, wherein the condition is non-small cell lung cancer (NSCLC) and the treatment comprises checkpoint inhibitors. In some embodiments, the outcome comprises overall survival time. In some embodiments, the outcome comprises progression-free survival time. In some embodiments, the treatment comprises one or more of ipilimumab, nivolumab, and pembrolizumab. In some embodiments, the treatment comprises one or more of PD-1-, PD-L1-, and CTLA-4-inhibitors. In some embodiments, the treatment comprises chemotherapy. In some embodiments, the chemotherapy comprises one or more of carboplatin and pemetrexed. In some embodiments, the recommendation comprises continuing the treatment if the output probability indicates the treatment positively influences the outcome.

[1174] In some embodiments, provided herein are methods for identifying a classification for a sample, the method comprising: quantifying by mass spectroscopy (MS) one or more glycopeptides in a sample wherein the glycopeptides each, individually in each instance, comprises a glycopeptide consisting essentially of an amino acid sequence selected from the group consisting of SEQ ID NO: 673-703, 731-779, and 570-595, and combinations thereof, and inputting the quantification into a trained model to generate an output probability; determining if the output probability is above or below a threshold for a classification; and identifying a classification for the sample based on whether the output probability is above or below a threshold for a classification.

[1175] In some embodiments, provided herein are methods for training a machine-learning algorithm, comprising: providing a first data set of MRM transition signals indicative of a sample comprising a glycopeptide consisting of, or consisting essentially of, an amino acid sequence selected from the group consisting of SEQ ID NO: 673-703, 731-779, and 570-595; providing a second data set of MRM transition signals indicative of a control sample; and comparing the first data set with the second data set using a machine-learning algorithm.

[1176] In some embodiments, provided herein are methods for diagnosing a patient having cancer; the method comprising: obtaining a biological sample from the patient; performing mass spectroscopy of the biological sample using MRM-MS with a QQQ and/or qTOF spectrometer to detect and quantify one or more glycopeptides consisting essentially of an amino acid sequence selected from the group consisting of SEQ ID NO: 673-703, 731-779, and 570-595; or to detect and quantify one or more MRM transitions; inputting the quantification of the detected glycopeptides or the MRM transitions into a trained model to generate an output probability, determining if the output probability is above or below a threshold for a classification; identifying a diagnostic classification for the patient based on whether the output probability is above or below a threshold for a classification; and providing a recommendation for treatment. In some examples, the method includes performing mass spectroscopy of the biological sample using MRM-MS with a QQQ.

### II. Biomarkers

[1177] Provided herein are glycopeptide biomarkers. These biomarkers are useful for a variety of applications, including, but not limited to, diagnosing diseases and conditions. For example, certain biomarkers set forth herein, or combinations thereof, are useful for diagnosing cancer. In some embodiments, the cancer is melanoma. In some embodiments, the cancer is non-small cell lung cancer (NSCLC). In some embodiments, the biomarkers are useful for diagnosing and screening patients having cancer, an autoimmune disease, or fibrosis. In some embodiments, the biomarkers are useful for classifying a patient so that the patient receives the appropriate medical treatment. In some embodiments, the biomarkers are useful for treating or ameliorating a disease or condition in patient by, for example, identifying a therapeutic agent with which to treat a patient. In some embodiments, the biomarkers are useful for determining a prognosis of treatment for a patient or a likelihood of success or survivability for a treatment regimen.

[1178] In some embodiments, a sample from a patient is analyzed by MS and the results are used to determine the presence, absolute amount, and/or relative amount of a glycopeptide consisting of an amino acid sequence selected from SEQ ID NO: 673-703, 731-779, and 570-595 in the sample. In some embodiments, a sample from a patient is analyzed by MS and the results are used to determine the presence, absolute amount, and/or relative amount of a glycopeptide consisting essentially of an amino acid sequence selected from SEQ ID NO: 673-703, 731-779, and 570-595 in the sample. In some embodiments, a sample from a patient is analyzed by MS and the results are used to determine the presence, absolute amount, and/or relative amount of a glycopeptide consisting of, or consisting essentially of, an amino acid sequence selected from SEQ ID NO: 673-703, 731-779, and 570-595 in the sample. In some embodiments, a sample from a patient is analyzed by MS and the results are used to determine the presence, absolute amount, and/or relative amount of a glycopeptide consisting of, or consisting essentially of, an amino acid sequence selected from SEQ ID NO: 673-703, 731-779, and 570-595 in the sample. In some embodiments, the presence, absolute amount, and/or relative amount of a glycopeptide is determined by analyzing the MS results. In some embodiments, the MS results are analyzed using machine-learning.

[1179] Provided herein are biomarkers selected from glycans, peptides, glycopeptides, fragments thereof, and combinations thereof. In some embodiments, the glycopeptide comprise an amino acid sequence selected from SEQ ID NO: 673-703, 731-779, and 570-595. In some embodiments, the glycopeptide consists essentially of an amino acid sequence selected from SEQ ID NO: 673-703, 731-779, and 570-595.

### O-Glycosylation

[1180] In some examples, the glycopeptides set forth herein include O-glycosylated peptides. These peptides include glycopeptides in which a glycan is bonded to the peptide through an oxygen atom of an amino acid. Typically, the amino acid to which the glycan is bonded is threonine (T) or serine (S). In some examples, the amino acid to which the glycan is bonded is threonine (T). In some examples, the amino acid to which the glycan is bonded is serine (S).

[1181] In certain examples, the O-glycosylated peptides include those peptides from the group selected from Apolipoprotein C-III (APOC3), Alpha-2-HS-glycoprotein (FETUA), and combinations thereof. In certain examples, the O-glycosylated peptide, set forth herein, is an Apolipoprotein C-III (APOC3) peptide. In certain examples, the O-glycosylated peptide, set forth herein, is an Alpha-2-HS-glycoprotein (FETUA).

### N-Glycosylation

[1182] In some examples, the glycopeptides set forth herein include N-glycosylated peptides. These peptides include glycopeptides in which a glycan is bonded to the peptide through a nitrogen atom of an amino acid. Typically, the amino acid to which the glycan is bonded is asparagine (N) or arginine (R). In some examples, the amino acid to which the glycan is bonded is asparagine (N). In some examples, the amino acid to which the glycan is bonded is arginine (R).

[1183] In certain examples, the N-glycosylated peptides include members selected from the group consisting of Alpha-1-antitrypsin (AlAT), Alpha-iB-glycoprotein (A1BG), Leucine-richAlpha-2-glycoprotein (A2GL), Alpha-2-macroglobulin (A2MG), Alpha-1-antichymotrypsin (AACT), Afamin (AFAM), Alpha-1-acid glycoprotein 1 & 2 (AGP12), Alpha-1-acid glycoprotein 1 (AGP1), Alpha-1-acid glycoprotein 2 (AGP2), Apolipoprotein A-1 (APOA1), Apolipoprotein B-100 (APOB), Apolipoprotein D (APOD), Beta-2-glycoprotein-1 (APOH), Apolipoprotein M (APOM), Attractin (ATRN), Calpain-3 (CAN3), Ceruloplasmin (CERU), Complement Factor H (CFAH), Complement Factor I (CFAI), Clusterin (CLUS), ComplementC3 (CO3), ComplementC4-A&B (CO4A&CO4B), ComplementcomponentC6 (CO6),

[1184] ComplementComponentC8AChain (CO8A), Coagulation factor XII (FA12),

[1185] Haptoglobin (HPT), Histidine-rich Glycoprotein (HRG), Immunoglobulin heavy constant alpha 1&2 (IgAl2), Immunoglobulin heavy constant alpha 2 (IgA2),

[1186] Immunoglobulin heavy constant gamma 2 (IgG2), Immunoglobulin heavy constant mu (IgM), Inter-alpha-trypsin inhibitor heavy chain H1 (ITIH1), Plasma Kallikrein (KLKB1),

[1187] Kininogen-1 (KNG1), Serum paraoxonase/arylesterase 1 (PON1), Selenoprotein P (SEPP1), Prothrombin (THRB), Serotransferrin (TRFE), Transthyretin (TTR), Protein unc-13HomologA (UN13A), Vitronectin (VTNC), Zinc-alpha-2-glycoprotein (ZA2G), Insulin-like growth factor-II (IGF2), Apolipoprotein C-1 (APOC1), Hemopexin (HEMO), Immunoglobulin heavy constant gamma 1 (IgG1), Immunoglobulin J chain (IgJ), and combinations thereof.

### Peptides and Glycopeptides

[1188] In some examples, set forth herein is a glycopeptide or peptide consisting of an amino acid sequence selected from the group consisting of SEQ ID NO: 673-703, 731-779, and 570-595, and combinations thereof.

[1189] In some examples, set forth herein is a glycopeptide or peptide consisting essentially of an amino acid sequence selected from the group consisting of SEQ ID NO: 673-703, 731-779, and 570-595, and combinations thereof.

### III. Methods

[1190] Provided herein are methods of identifying the glycoproteomic biomarkers and signatures that may be used to predict which cancer patients respond to immune checkpoint blockade treatment, such as PD1/PDL1 checkpoint inhibitors, and have an improvement or a positive change in their condition.

[1191] In some embodiments, individual glycopeptide expression levels are associated with various timepoints to determine which glycopeptides changed with events, such as death or metastasis, at the various timepoints. In some embodiments, individual glycopeptide expression levels are associated with time from treatment initiation to progression/metastasis (progression-free survival, PFS) or death (overall survival, OS) in the patient cohorts. In some embodiments, examples of individual glycopeptide expression levels are shown in FIGS. 75-139.

[1192] In some embodiments, multivariable models are used predict OS and PFS in cancer patients. In some embodiments, the cancer patients have NSCLC or melanoma. In some embodiments, a small subset of glycopeptides for modeling are selected, a model with n-1 patients from a total of n patients is built, a survival score on the one holdout patient is predicted, and the step are iterated over all patients as individual holdouts, to generate unbiased prediction scores for everyone (a leave-one-out cross-validation approach, LOOCV). In some embodiments, the resulting scores are dichotomized at a cutoff which optimizes Harrell's C-index. In some embodiments, Kaplan-Meier (KM) curves were plotted for each glycopeptide.

[1193] In some embodiments, hazard ratio (HR), p-value, and interaction P-value were calculated. In some embodiments, hazard ratio (HR) is calculated from a Cox Proportional Hazards model, representing the multiplicative increase in odds of death or progression-free survival time for each increase of the biomarker by 1 unit. In some embodiments, p-value is associated with the HR above. In some embodiments, P<0.01 was considered significant. In some embodiments, P≤0.05, P≤0.01, P≤0.005, or P≤0.001 was considered significant. In some embodiments, interaction P-value is associated with the biomarker ×treatment interaction; significance indicates potential for use in treatment selection.

[1194] In some embodiments, the model helped to determine whether the glycopeptide marker individually predictive of OS. In some embodiments, the model helped to determine whether the glycopeptide marker individually predictive of PFS. In some embodiments, the model helped to determine whether the glycopeptide marker individually is of use in treatment selection or varied with and without treatment. In some embodiments, individual Kaplan-Meier (KM) curves are plotted for the markers relevant in each disease for each outcome, such as OS or PFS. In some embodiments, hazard ratios and p-values on the plots are representative of the plotted high/low split at median biomarker expression. Examples of individual KM curves are shown in FIGS. 75-139 for melanoma and NSCLC. FIGS. 75-100 show overall survival (OS) Kaplan-Meier curves of patients with metastatic melanoma for various glycopeptide fragments. FIGS. 101-139 show progression-free survival (PFS) Kaplan-Meier curves of patients with metastatic melanoma for various glycopeptide fragments. Examples of such multivariate KM curves generated from the individual KM curves are seen in FIGS. 73A, 73B, 74A, and 74B. FIGS. 140A and 140B illustrate an algorithm development pipeline for identifying non-small-cell lung cancer (NSCLC), in accordance with the presently disclosed embodiments. FIGS. 141A and 141B illustrate a multivariate classifier development for case-control studies for identifying non-small-cell lung cancer (NSCLC), in accordance with the presently disclosed embodiments. FIGS. 142A-142D illustrate scoring prediction curves for identifying non-small-cell lung cancer (NSCLC), in accordance with the presently disclosed embodiments.

[1195] In some embodiments, patients are treated with a therapeutically effective amount of an immune-therapeutic. In some embodiments, the immune-therapeutic comprises an immune checkpoint inhibitor. In some embodiments, the checkpoint inhibitor comprises PD-1 inhibitors, PD-L1 inhibitors, or CTLA-4 inhibitors, or combinations thereof.

[1196] In some embodiments, patients are treated with a therapeutically effective amount of a targeted therapeutic agent. In some embodiments, the targeted therapeutic agent is a drug that targets blood vessel that targets vascular endothelial growth factor (VEGF) such as bevacizumab, ramucirumab, and ziv-aflibercept. In some embodiments, the targeted therapeutic agent comprises an epidermal growth factor receptor (EGFR). In some embodiments, the EGFR comprises cetuximab or panitumumab. In some embodiments, the targeted therapeutic agent comprises a kinase inhibitor. In some embodiments, the kinase inhibitor comprises regorafenib.

[1197] In some embodiments, the patient is treated with a targeted therapy. In some embodiments, the methods herein include administering a therapeutically effective amount of one or more of 5-fluorouracil (5-FU); capecitabine, irinotecan, oxaliplatin, trifluridine, or tipiracil.

### Methods for Detecting Glycopeptides

[1198] In some embodiments, provided herein are methods for detecting one or more a multiple-reaction-monitoring (MRM) transition, comprising: obtaining a biological sample from a patient, wherein the biological sample comprises one or more glycopeptides; digesting and/or fragmenting a glycopeptide in the sample; and detecting a multiple-reaction-monitoring (MR) transition.

[1199] In some embodiments, provided herein are methods of detecting one or more glycopeptides, wherein each glycopeptide is individually in each instance selected from a glycopeptide consisting of an amino acid sequence selected from the group consisting of SEQ ID NOs: 570-595, 673-703, and 731-779, and combinations thereof. In some embodiments, provided herein are methods of detecting one or more glycopeptides, wherein each glycopeptide is individually in each instance selected from a glycopeptide consisting essentially of an amino acid sequence selected from the group consisting of SEQ ID NO: 673-703, 731-779, and 570-595, and combinations thereof.

[1200] In some embodiments, provided herein are methods of detecting one or more glycopeptides. In some examples, set forth herein is a method of detecting one or more glycopeptide fragments. In certain examples, the method includes detecting the glycopeptide group to which the glycopeptide, or fragment thereof, belongs. In some of these examples, the glycopeptide group is selected from Alpha-1-antitrypsin (AlAT), Alpha-1B-glycoprotein (A1BG), Leucine-richAlpha-2-glycoprotein (A2GL), Alpha-2-macroglobulin (A2MG),

[1201] Alpha-1-antichymotrypsin (AACT), Afamin (AFAM), Alpha-1-acid glycoprotein 1 & 2 (AGP12), Alpha-1-acid glycoprotein 1 (AGP1), Alpha-1-acid glycoprotein 2 (AGP2), Apolipoprotein A-1 (APOA1), Apolipoprotein C-III (APOC3), Apolipoprotein B-100 (APOB), Apolipoprotein D (APOD), Beta-2-glycoprotein-1 (APOH), Apolipoprotein M (APOM), Attractin (ATRN), Calpain-3 (CAN3), Ceruloplasmin (CERU), Complement Factor H (CFAH), Complement Factor I (CFAI), Clusterin (CLUS), ComplementC3 (CO3), ComplementC4-A&B (CO4A&CO4B), ComplementcomponentC6 (CO6), ComplementComponentC8AChain (CO8A), Coagulation factor XII (FA12), Alpha-2-HS-glycoprotein (FETUA), Haptoglobin (HPT), Histidine-rich Glycoprotein (HRG), Immunoglobulin heavy constant alpha 1&2 (IgAl2), Immunoglobulin heavy constant alpha 2 (IgA2), Immunoglobulin heavy constant gamma 2 (IgG2), Immunoglobulin heavy constant mu (IgM), Inter-alpha-trypsin inhibitor heavy chain H1 (ITIH1), Plasma Kallikrein (KLKB1), Kininogen-1 (KNG1), Serum paraoxonase/arylesterase 1 (PON1), Selenoprotein P (SEPP1), Prothrombin (THRB), Serotransferrin (TRFE), Transthyretin (TTR), Protein unc-13HomologA (UN13A), Vitronectin (VTNC), Zinc-alpha-2-glycoprotein (ZA2G), Insulin-like growth factor-II (IGF2), Apolipoprotein C-I (APOC1), and combinations thereof.

[1202] In some embodiments, provided herein are methods comprising detecting a glycopeptide, a glycan on the glycopeptide and the glycosylation site residue where the glycan bonds to the glycopeptide. In some embodiments, the method includes detecting a glycan residue. In some embodiments, the method includes detecting a glycosylation site on a glycopeptide. In some embodiments, this process is accomplished with mass spectroscopy used in tandem with liquid chromatography.

[1203] In some embodiments, provided herein are methods comprising obtaining a biological sample from a patient. In some examples, the biological sample is synovial fluid, whole blood, blood serum, blood plasma, urine, sputum, tissue, saliva, tears, spinal fluid, tissue section(s) obtained by biopsy; cell(s) that are placed in or adapted to tissue culture; sweat, mucous, fecal material, gastric fluid, abdominal fluid, amniotic fluid, cyst fluid, peritoneal fluid, pancreatic juice, breast milk, lung lavage, bone marrow, gastric acid, bile, semen, pus, aqueous humor, transudate, or combinations of the foregoing. In some examples, the biological sample is selected from the group consisting of blood, plasma, saliva, mucus, urine, stool, tissue, sweat, tears, hair, or a combination thereof. In some examples, the biological sample is a blood sample. In some examples, the biological sample is a plasma sample. In some examples, the biological sample is a saliva sample. In some examples, the biological sample is a mucus sample. In some examples, the biological sample is a urine sample. In some examples, the biological sample is a stool sample. In some examples, the biological sample is a sweat sample. In some examples, the biological sample is a tear sample. In some examples, the biological sample is a hair sample.

[1204] In some examples, the method comprises digesting and/or fragmenting a glycopeptide in the sample. In some examples, the method includes digesting a glycopeptide in the sample. In some examples, the method includes fragmenting a glycopeptide in the sample. In some examples, the digested or fragmented glycopeptide is analyzed using mass spectroscopy. In some examples, the glycopeptide is digested or fragmented in the solution phase using digestive enzymes. In some examples, the glycopeptide is digested or fragmented in the gaseous phase inside a mass spectrometer, or the instrumentation associated with a mass spectrometer. In some examples, the mass spectroscopy results are analyzed using machine-learning algorithms. In some examples, the mass spectroscopy results are the quantification of the glycopeptides, glycans, peptides, and fragments thereof. In some examples, this quantification is used as an input in a trained model to generate an output probability. The output probability is a probability of being within a given category or classification, e.g., the classification of having cancer or the classification of not having cancer. In some other examples, the output probability is a probability of being within a given category or classification, e.g., the classification of having cancer or the classification of not having cancer. In some examples, the output probability is a probability of being within a given category or classification, e.g., the classification of having an autoimmune disease or the classification of not having an autoimmune disease. In some examples, the output probability is a probability of being within a given category or classification, e.g., the classification of having fibrosis or the classification of not having fibrosis.

[1205] In some examples, the mass spectroscopy is performed using multiple reaction monitoring (MRM) mode. In some examples, the mass spectroscopy is performed using qTOF MS in data-dependent acquisition. In some examples, the mass spectroscopy is performed using or MS-only mode.

[1206] In some examples, the method comprises introducing the sample, or a portion thereof, into a mass spectrometer. In some examples, the method comprises fragmenting a glycopeptide in the sample after introducing the sample, or a portion thereof, into the mass spectrometer. In some examples, the method includes digesting a glycopeptide in the sample occurs before introducing the sample, or a portion thereof, into the mass spectrometer. In some examples, the method comprises fragmenting a glycopeptide in the sample to provide a glycopeptide ion, a peptide ion, a glycan ion, a glycan adduct ion, or a glycan fragment ion. In some examples, the method comprises digesting and/or fragmenting a glycopeptide in the sample to provide one or more glycopeptides consisting of an amino acid sequence selected from the group consisting of SEQ ID NO: 673-703, 731-779, and 570-595, and combinations thereof. In some examples, the method comprises digesting and/or fragmenting a glycopeptide in the sample to provide one or more glycopeptides consisting essentially of an amino acid sequence selected from the group consisting of SEQ ID NO: 673-703, 731-779, and 570-595, and combinations thereof.

[1207] In some examples, the method includes detecting an MRM transition indicative of a glycopeptide or glycan residue, wherein the glycopeptide consists essentially of an amino acid sequence selected from the group consisting of SEQ ID NO: 673-703, 731-779, and 570-595 and combinations thereof. In some examples, the method includes detecting an MRM transition indicative of a glycopeptide consisting essentially of an amino acid sequence selected from the group consisting of SEQ ID NO: 673-703, 731-779, and 570-595 and combinations thereof. In some examples, the method includes detecting more than one MRM transition indicative of a combination of glycopeptides having amino acid sequences selected from a combination of SEQ ID NO: 673-703, 731-779, and 570-595.

[1208] In some examples, the method includes detecting a MRM transition indicative of a glycopeptide or glycan residue, wherein the glycopeptide consists essentially of an amino acid sequence selected from the group consisting of SEQ ID NO: 673-703, 731-779, and 570-595, and combinations thereof. In some examples, the method includes detecting a MRM transition indicative of a glycopeptide consisting essentially of an amino acid sequence selected from the group consisting of SEQ ID NO: 101-131, and combinations thereof. In some examples, the method includes detecting a MRM transition indicative of a glycopeptide consisting essentially of an amino acid sequence selected from the group consisting of SEQ ID NO: 159-207, and combinations thereof. In some examples, the method includes detecting a MRM transition indicative of a glycopeptide consisting essentially of an amino acid sequence selected from the group consisting of SEQ ID NO: 570-595, and combinations thereof.

[1209] In some examples, the method includes detecting a MRM transition indicative of a glycopeptide or glycan residue, wherein the glycopeptide consists essentially of an amino acid sequence selected from the group consisting of SEQ ID NOs: 221-46, and combinations thereof. In some examples, the method includes detecting a MRM transition indicative of a glycopeptide consisting essentially of an amino acid sequence selected from the group consisting of SEQ ID NOs: 673-703, and combinations thereof.. In some examples, the method includes detecting a MRM transition indicative of a glycopeptide or glycan residue, wherein the glycopeptide consists essentially of an amino acid sequence selected from the group consisting of 159-207.

[1210] In some examples, the method comprises performing mass spectroscopy on the biological sample using multiple-reaction-monitoring mass spectroscopy (MR-MS).

[1211] In some examples, the method includes digesting a glycoprotein in the sample to provide one or more glycopeptides consisting essentially of an amino acid sequence selected from the group consisting of SEQ ID NO: 673-703, 731-779, and 570-595, and combinations thereof. In some examples, the biological sample is combined with chemical reagents. In some examples, the biological sample is combined with enzymes. In some examples, the enzymes are lipases. In some examples, the enzymes are proteases. In some examples, the enzymes are serine proteases. In some examples, the enzyme is selected from the group consisting of trypsin, chymotrypsin, thrombin, elastase, and subtilisin. In some examples, the enzyme is trypsin. In some examples, the methods comprises contacting at least two proteases with a glycopeptide in a sample. In some examples, the at least two proteases are selected from the group consisting of serine protease, threonine protease, cysteine protease, aspartate protease. In some examples, the at least two proteases are selected from the group consisting of trypsin, chymotrypsin, endoproteinase, Asp-N, Arg-C, Glu-C, Lys-C, pepsin, thermolysin, elastase, papain, proteinase K, subtilisin, clostripain, and carboxypeptidase protease, glutamic acid protease, metalloprotease, and asparagine peptide lyase.

[1212] In some examples, the method includes detecting an MRM transition indicative of a glycopeptide or glycan residue, wherein the glycopeptide consisting of, or consisting essentially of, an amino acid sequence selected from the group consisting of SEQ ID NO: 673-703, 731-779, and 570-595 and combinations thereof. In some examples, the method includes detecting an MRM transition indicative of a glycopeptide or glycan residue, wherein the glycopeptide consists essentially of an amino acid sequence selected from the group consisting of SEQ ID NO: 673-703, 731-779, and 570-595 and combinations thereof. In some examples, the method includes detecting an MRM transition indicative of a glycopeptide consisting essentially of an amino acid sequence selected from the group consisting of SEQ ID NO: 673-703, 731-779, and 570-595 and combinations thereof. In some examples, the method includes detecting more than one MRM transition indicative of a combination of glycopeptides having amino acid sequences selected from a combination of SEQ ID NO: 673-703, 731-779, and 570-595.

[1213] In some examples, the method includes detecting a MRM transition indicative of a glycopeptide or glycan residue, wherein the glycopeptide consists essentially of an amino acid sequence selected from the group consisting of SEQ ID NO: 673-703, 731-779, and 570-595, and combinations thereof.

[1214] In some examples, the method comprises performing mass spectroscopy on the biological sample using multiple-reaction-monitoring mass spectroscopy (MRM-MS).

[1215] In some examples, the method comprises digesting a glycopeptide in the sample to provide a glycopeptide consisting of an amino acid sequence selected from the group consisting of SEQ ID NO: 673-703, 731-779, and 570-595, and combinations thereof. In some examples, the biological sample is contacted with one or more chemical reagents. In some examples, the biological sample is contacted with one or more enzymes. In some examples, the enzymes are lipases. In some examples, the enzymes are proteases. In some examples, the enzymes are serine proteases. In some examples, the enzyme is selected from the group consisting of trypsin, chymotrypsin, thrombin, elastase, and subtilisin. In some of these examples, the enzyme is trypsin. In some examples, the methods include contacting at least two proteases with a glycopeptide in a sample. In some examples, the at least two proteases are selected from the group consisting of serine protease, threonine protease, cysteine protease, aspartate protease. In some examples, the at least two proteases are selected from the group consisting of trypsin, chymotrypsin, endoproteinase, Asp-N, Arg-C, Glu-C, Lys-C, pepsin, thermolysin, elastase, papain, proteinase K, subtilisin, clostripain, and carboxypeptidase protease, glutamic acid protease, metalloprotease, and asparagine peptide lyase.

[1216] In some examples, the method includes conducting tandem liquid chromatography-mass spectroscopy on the biological sample. In some examples, the method includes multiple-reaction-monitoring mass spectroscopy (MRM-MS) mass spectroscopy on the biological sample. In some examples, the method includes detecting an MRM transition using a triple quadrupole (QQQ) and/or a quadrupole time-of-flight (qTOF) mass spectrometer. In some examples, the method includes detecting an MRM transition using a QQQ mass spectrometer. In some examples, the method includes detecting using a qTOF mass spectrometer. In some examples, a suitable instrument for use with the instant methods is an Agilent 6495B Triple Quadrupole LC/MS. In some examples, the method includes detecting using a QQQ mass spectrometer. In some examples, a suitable instrument for use with the instant methods is an Agilent 6545 L/Q-TOF.

[1217] In some examples, the method comprises detecting more than one MRM transition using a QQQ and/or qTOF mass spectrometer. In some examples, the method includes detecting more than one MRM transition using a QQQ mass spectrometer. In some examples, the method includes detecting more than one MRM transition using a qTOF mass spectrometer. In some examples, the method includes detecting more than one MRM transition using a QQQ mass spectrometer.

[1218] In some examples, the methods herein include quantifying one or more glycomic parameters of the one or more biological samples comprises employing a coupled chromatography procedure. In some examples, these glycomic parameters include the identification of a glycopeptide group, identification of glycans on the glycopeptide, identification of a glycosylation site, identification of part of an amino acid sequence which the glycopeptide includes. In some examples, the coupled chromatography procedure comprises: performing or effectuating a liquid chromatography-mass spectrometry (LC-MS) operation. In some examples, the coupled chromatography procedure comprises: performing or effectuating a multiple reaction monitoring mass spectrometry (MRM-MS) operation. In some examples, the methods herein include a coupled chromatography procedure which comprises: performing or effectuating a liquid chromatography-mass spectrometry (LC-MS) operation; and effectuating a multiple reaction monitoring mass spectrometry (MRM-MS) operation. In some examples, the methods include training a machine-learning algorithm using one or more glycomic parameters of the one or more biological samples obtained by one or more of a triple quadrupole (QQQ) mass spectrometry operation and/or a quadrupole time-of-flight (qTOF) mass spectrometry operation. In some examples, the methods include training a machine-learning algorithm using one or more glycomic parameters of the one or more biological samples obtained by a triple quadrupole (QQQ) mass spectrometry operation. In some examples, the methods include training a machine-learning algorithm using one or more glycomic parameters of the one or more biological samples obtained by a quadrupole time-of-flight (qTOF) mass spectrometry operation. In some examples, the methods include quantifying one or more glycomic parameters of the one or more biological samples comprises employing one or more of a triple quadrupole (QQQ) mass spectrometry operation and a quadrupole time-of-flight (qTOF) mass spectrometry operation. In some examples, machine-learning algorithms are used to quantify these glycomic parameters. In some examples, including any of the foregoing, the mass spectroscopy is performed using multiple reaction monitoring (MRM) mode. In some examples, the mass spectroscopy is performed using qTOF MS in data-dependent acquisition. In some examples, the mass spectroscopy is performed using or MS-only mode.

[1219] In some examples, the method includes detecting one or more MRM transitions indicative of glycans. In some examples, the method comprises quantifying a glycan. In some examples, the method comprises quantifying a first glycan and quantifying a second glycan; and further comprising comparing the quantification of the first glycan with the quantification of the second glycan. In some examples, the method comprises associating the detected glycan with a peptide residue site, whence the glycan was bonded. In some examples, the method comprises generating a glycosylation profile of the sample. In some examples, the method comprises associating the detected glycan with a timepoint.

[1220] In some examples, the method includes spatially profiling glycans on a tissue section associated with the sample. In some examples, including any of the foregoing, the method includes spatially profiling glycopeptides on a tissue section associated with the sample. In some examples, the method includes matrix-assisted laser desorption ionization time-of-flight mass spectrometry (MALDI-TOF) mass spectroscopy in combination with the methods herein.

[1221] In some examples, the method includes quantifying relative abundance of a glycan and/or a peptide.

[1222] In some examples, the method includes normalizing the amount of a glycopeptide by quantifying a glycopeptide consisting essentially of an amino acid sequence selected from the group consisting of SEQ ID NO: 673-703, 731-779, and 570-595, and combinations thereof and comparing that quantification to the amount of another chemical species. In some examples, the method includes normalizing the amount of a peptide by quantifying a glycopeptide consisting of an amino acid sequence selected from the group consisting of SEQ ID NO: 673-703, 731-779, and 570-595, and combinations thereof, and comparing that quantification to the amount of another glycopeptide consisting of an amino acid sequence selected from the group consisting of SEQ ID NO: 673-703, 731-779, and 570-595. In some examples, the method includes normalizing the amount of a peptide by quantifying a glycopeptide consisting essentially of an amino acid sequence selected from the group consisting of SEQ ID NO: 673-703, 731-779, and 570-595, and combinations thereof, and comparing that quantification to the amount of another glycopeptide consisting essentially of an amino acid sequence selected from the group consisting of SEQ ID NO: 673-703, 731-779, and 570-595.

### Methods for Classifying Samples Comprising Glycopeptides

[1223] In some embodiment, provided herein are methods for identifying a classification for a sample, the method comprising: quantifying by mass spectroscopy (MS) one or more glycopeptides in a sample wherein the glycopeptides each, individually in each instance, comprises a glycopeptide consisting essentially of an amino acid sequence selected from the group consisting of, or consisting essentially of SEQ ID NO: 673-703, 731-779, and 570-595, and combinations thereof, and inputting the quantification into a trained model to generate a output probability; determining if the output probability is above or below a threshold for a classification; and identifying a classification for the sample based on whether the output probability is above or below a threshold for a classification.

[1224] In some examples, provided herein are methods for identifying glycopeptide biomarkers, comprising: obtaining a biological sample from a patient; digesting and/or fragmenting a glycopeptide in the sample; detecting a multiple-reaction-monitoring (MRM) transition; and classifying the glycopeptides based on the MRM transitions detected. In some examples, a machine-learning algorithm is used to train a model using the analyzed the MRM transitions as inputs. In some examples, a machine-learning algorithm is trained using the MRM transitions as a training data set. In some examples, the methods herein include identifying glycopeptides, peptides, and glycans based on their mass spectroscopy relative abundance. In some examples, a machine-learning algorithm or algorithms select and/or identify peaks in a mass spectroscopy spectrum. In some examples, the MS is MRM-MS with a QQQ and/or qTOF mass spectrometer.

[1225] In some examples, including any of the foregoing, the mass spectroscopy is performed using multiple reaction monitoring (MRM) mode. In some examples, the mass spectroscopy is performed using qTOF MS in data-dependent acquisition. In some examples, the mass spectroscopy is performed using or MS-only mode.

[1226] In some examples, the machine-learning algorithm is selected from the group consisting of a deep learning algorithm, a neural network algorithm, an artificial neural network algorithm, a supervised machine-learning algorithm, a linear discriminant analysis algorithm, a quadratic discriminant analysis algorithm, a support vector machine algorithm, a linear basis function kernel support vector algorithm, a radial basis function kernel support vector algorithm, a random forest algorithm, a genetic algorithm, a nearest neighbor algorithm, k-nearest neighbors, a naive Bayes classifier algorithm, a logistic regression algorithm, or a combination thereof. In certain examples, the machine-learning algorithm is lasso regression.

[1227] In some examples, the method includes classifying a sample as within, or embraced by, a disease classification or a disease severity classification.

[1228] In some examples, the classification is identified with 80% confidence, 85% confidence, 90% confidence, 95% confidence, 99% confidence, or 99.9999% confidence.

[1229] In some examples, the method includes quantifying by MS the glycopeptide in a sample at a first time point; quantifying by MS the glycopeptide in a sample at a second time point; and comparing the quantification at the first time point with the quantification at the second time point.

[1230] In some examples, the method includes quantifying by MS a different glycopeptide in a sample at a third time point; quantifying by MS the different glycopeptide in a sample at a fourth time point; and comparing the quantification at the fourth time point with the quantification at the third time point.

[1231] In some examples, the method includes monitoring the health status of a patient.

[1232] In some examples, monitoring the health status of a patient includes monitoring the onset and progression of disease in a patient with risk factors such as genetic mutations, as well as detecting cancer recurrence.

[1233] In some examples, the method includes diagnosing a patient with a disease or condition based on the quantification. In some examples, the method includes treating the patient with a therapeutically effective amount of a therapeutic agent comprising one or more of a chemotherapeutic, an immunotherapy, a hormone therapy, a targeted therapy, a neoadjuvant therapy, and surgery. In some embodiments, the treatment comprises checkpoint inhibitors. In some examples, the method includes diagnosing an individual with a disease or condition based on the quantification. In some examples, the method includes treating the individual with a therapeutically effective amount of a treatment.

### Methods for Diagnosing Patients

[1234] In some examples, provided herein are methods for assessing a patient having a disease or condition, comprising measuring by mass spectroscopy a glycopeptide in a sample from the patient.

[1235] In another embodiment, provided herein are methods for assessing a patient having cancer; the method comprising: obtaining a biological sample from the patient; performing mass spectroscopy of the biological sample using MRM-MS with a QQQ and/or qTOF spectrometer to detect and quantify one or more glycopeptides consisting essentially of an amino acid sequence selected from the group consisting of SEQ ID NO: 673-703, 731-779, and 570-595; inputting the quantification of the detected glycopeptides or the MRM transitions into a trained model to generate an output probability, determining if the output probability is above or below a threshold for a classification; and identifying a diagnostic classification for the patient based on whether the output probability is above or below a threshold for a classification; and assessing the patient as having cancer based on the classification.

[1236] In another embodiment, set forth herein is a method for diagnosing a patient having cancer; the method comprising: inputting the quantification of detected glycopeptides or MRM transitions into a trained model to generate an output probability, determining if the output probability is above or below a threshold for a classification; and identifying a diagnostic classification for the patient based on whether the output probability is above or below a threshold for a classification; and assessing the patient as based on the classification. In some examples, the method includes obtaining a biological sample from the patient; performing mass spectroscopy of the biological sample using MRM-MS with a QQQ and/or qTOF spectrometer to detect and quantify one or more glycopeptides consisting essentially of an amino acid sequence selected from the group consisting of 21-46, 101-131, and 159-207.

[1237] In some examples, set forth herein is a method for assessing a patient having cancer; the method comprising: obtaining a biological sample from the patient; performing mass spectroscopy of the biological sample using MRM-MS with a QQQ and/or qTOF spectrometer to detect one or more glycopeptides consisting or, or consisting essentially of, an amino acid sequence selected from the group consisting of SEQ ID NO: 673-703, 731-779, and 570-595; analyzing the detected glycopeptides or the MRM transitions to identify a classification; and assessing the patient based on the diagnostic classification.

[1238] In some examples, set forth herein is a method for assessing a patient having cancer; the method comprising: analyzing detected or quantified glycopeptides or MRM transitions to identify a classification; and assessing the patient based on the classification. In some examples, the method includes obtaining a biological sample from the patient; and performing mass spectroscopy of the biological sample using MRM-MS with a QQQ and/or qTOF spectrometer to detect one or more glycopeptides consisting or, or consisting essentially of, an amino acid sequence selected from the group consisting of SEQ ID NO: 673-703, 731-779, and 570-595.

[1239] In some examples, set forth herein is a method for diagnosing, monitoring, or classifying aging in an individual; the method comprising: obtaining a biological sample from the patient; performing mass spectroscopy of the biological sample using MRM-MS with a QQQ and/or qTOF spectrometer to detect one or more glycopeptides consisting or, or consisting essentially of, an amino acid sequence selected from the group consisting of SEQ ID NO: 673-703, 731-779, and 570-595; analyzing the detected glycopeptides or the MRM transitions to identify a diagnostic classification; and diagnosing, monitoring, or classifying the individual as having an aging classification based on the diagnostic classification.

### Diseases and Conditions

[1240] Provided herein are biomarkers for diagnosing a variety of diseases and conditions. In some examples, the diseases and conditions include cancer. In some examples, the diseases and conditions are not limited to cancer.

[1241] In some embodiments, cancer refers to a physiological condition in a subject that is typically characterized by unregulated cell growth. Examples of cancer include, but are not limited to, melanoma, carcinoma, lymphoma, blastoma, sarcoma, and leukemia and metastases thereof. The term “metastasis” refers to the transference of disease-producing organisms or of malignant or cancerous cells to other parts of the body by way of the blood or lymphatic vessels or membranous surfaces. Non-limiting examples of such cancers include small-cell lung cancer, non-small cell lung cancer, adenocarcinoma of the lung, squamous carcinoma of the lung, melanoma, squamous cell cancer, cancer of the peritoneum, hepatocellular cancer, gastrointestinal cancer, pancreatic cancer, glioblastoma, cervical cancer, ovarian cancer, liver cancer, bladder cancer, hepatoma, breast cancer, colon cancer, colorectal cancer, endometrial or uterine carcinoma, salivary gland carcinoma, kidney cancer, liver cancer, prostate cancer, thyroid cancer, hepatic carcinoma and various types of head and neck cancer. The phrase “stage of disease” refers to the stages of cancer progression referred to as Stage I, II, III, or IV. Stage of disease indicates if metastasis has occurred in the subject.

[1242] In some examples, the “patient” described herein is equivalently described as an “individual.” For example, in some methods herein, set forth are biomarkers for monitoring or diagnosing a disease or a condition in an individual. In some of these examples, the individual is not necessarily a patient who has a medical condition in need of therapy.

### Machine-Learning Model

[1243] In some examples, the methods herein comprise quantifying one or more glycopeptides consisting essentially of an amino acid sequence selected from the group consisting of SEQ ID NO: 673-703, 731-779, and 570-595 using mass spectroscopy and/or liquid chromatography. In some examples, the quantification results are used as inputs in a trained model. In some examples, the quantification results are classified or categorized with a predictive algorithm based on the absolute amount, relative amount, and/or type of each glycan or glycopeptide quantified in the test sample, wherein the predictive algorithm is trained on corresponding values for each marker obtained from a population of individuals having known diseases or conditions. In some examples, the disease or condition is cancer. In some cases, the disease or condition is melanoma. In some cases, the disease or condition is NSCLC.

[1244] In some examples, including any of the foregoing, set forth herein is a method for training a machine-learning algorithm, comprising: providing a first data set of MRM transition signals indicative of a sample comprising a glycopeptide consisting essentially of an amino acid sequence selected from the group consisting of SEQ ID NO: 673-703, 731-779, and 570-595; providing a second data set of MRM transition signals indicative of a control sample; and comparing the first data set with the second data set using a machine-learning algorithm.

[1245] In some examples, the methods herein include using a sample comprising a glycopeptide consisting of an amino acid sequence selected from the group consisting of SEQ ID NO: 673-703, 731-779, and 570-595 is a sample from a patient having the disease or condition. In some examples, the methods herein include using a sample comprising a glycopeptide consisting essentially of an amino acid sequence selected from the group consisting of SEQ ID NO: 673-703, 731-779, and 570-595 is a sample from a patient having cancer. In some examples, the methods herein include using a control sample, wherein the control sample is a sample from a patient not having the disease or condition.

[1246] In some examples, the methods herein include using a sample comprising a glycopeptide consisting essentially of an amino acid sequence selected from the group consisting of SEQ ID NO: 673-703, 731-779, and 570-595, which is a pooled sample from one or more patients having the disease or condition. In some examples, the methods herein include using a control sample, which is a pooled sample from one or more patients not having the disease or condition.

[1247] In some examples, the methods include generating machine-learning models trained using mass spectrometry data (e.g., MRM-MS transition signals) from patients having a disease or condition and patients not having a disease or condition. In some examples, the disease or condition is cancer. In some examples, the methods include optimizing the machine-learning models by cross-validation with known standards or other samples. In some examples, the methods include qualifying the performance using the mass spectrometry data to form panels of glycans and glycopeptides with individual sensitivities and specificities. In certain examples, the methods include determining a confidence percent in relation to a diagnosis. In some examples, one to ten glycopeptides consisting essentially of an amino acid sequence selected from the group consisting of SEQ ID NO: 673-703, 731-779, and 570-595 may be useful for diagnosing a patient with the disease or condition with a certain confidence percent. In some examples, ten to fifty glycopeptides consisting essentially of an amino acid sequence selected from the group consisting of SEQ ID NO: 673-703, 731-779, and 570-595 may be useful for diagnosing a patient with the disease or condition with a higher confidence percent.

[1248] In some examples, including any of the foregoing, the methods include performing MRM-MS and/or LC-MS on a biological sample. In some examples, the methods include constructing, by a computing device, theoretical mass spectra data representing a plurality of mass spectra, wherein each of the plurality of mass spectra corresponds to one or more glycopeptides consisting essentially of an amino acid sequence selected from the group consisting of SEQ ID NO: 673-703, 731-779, and 570-595. In some examples, the methods include comparing, by the computing device, the mass spectra data with the theoretical mass spectra data to generate comparison data indicative of a similarity of each of the plurality of mass spectra to each of the plurality of theoretical target mass spectra associated with a corresponding glycopeptide of the plurality of glycopeptides.

[1249] In some examples, machine-learning algorithms are used to determine, by the computing device and based on the MRM-MS data, a distribution of a plurality of characteristic ions in the plurality of mass spectra; and determining, by the computing device and based on the distribution, whether one or more of the plurality of characteristic ions is a glycopeptide ion.

[1250] In some examples, the methods herein include training a predictive algorithm. Herein, training the predictive algorithm may refer to supervised learning of a predictive algorithm on the basis of values for one or more glycopeptides consisting of, or consisting essentially of, an amino acid sequence selected from the group consisting of SEQ ID NO: 673-703, 731-779, and 570-595. Training the predictive algorithm may refer to variable selection in a statistical model on the basis of values for one or more glycopeptides consisting essentially of an amino acid sequence selected from the group consisting of SEQ ID NO: 673-703, 731-779, and 570-595. Training a predictive algorithm may for example include determining a weighting vector in feature space for each category, or determining a function or function parameters.

[1251] In some examples, the machine-learning algorithm is selected from the group consisting of a deep learning algorithm, a neural network algorithm, an artificial neural network algorithm, a supervised machine-learning algorithm, a linear discriminant analysis algorithm, a quadratic discriminant analysis algorithm, a support vector machine algorithm, a linear basis function kernel support vector algorithm, a radial basis function kernel support vector algorithm, a random forest algorithm, a genetic algorithm, a nearest neighbor algorithm, k-nearest neighbors, a naive Bayes classifier algorithm, a logistic regression algorithm, or a combination thereof. In certain examples, the machine-learning algorithm is lasso regression.

[1252] In some examples, the machine-learning algorithm is LASSO, Ridge Regression, Random Forests, K-nearest Neighbors (KNN), Deep Neural Networks (DNN), and Principal Components Analysis (PCA). In certain examples, DNN's are used to process mass spec data into analysis-ready forms. In some examples, DNN's are used for peak picking from a mass spectra. In some examples, PCA is useful in feature detection.

[1253] In some examples, LASSO is used to provide feature selection.

[1254] In some examples, machine-learning algorithms are used to quantify peptides from each protein that are representative of the protein abundance. In some examples, this quantification includes quantifying proteins for which glycosylation is not measured.

[1255] In some examples, glycopeptide sequences are identified by fragmentation in the mass spectrometer and database search using Byonic software (Protein Metrics Inc).

[1256] In some examples, the methods herein include unsupervised learning to detect features of MRMS-MS data that represent known biological quantities, such as protein function or glycan motifs. In certain examples, these features are used as input for classifying by machine-learning. In some examples, the classification is performed using LASSO, Ridge Regression, or Random Forest nature.

[1257] In some examples, the methods herein include mapping input data (e.g., MRM transition peaks) to a value (e.g., a scale based on 0-100) before processing the value in an algorithm. For example, after an MRM transition is identified and the peak characterized, the methods herein include assessing the MS scans in an m/z and retention time window around the peak for a given patient. In some examples, the resulting chromatogram is integrated by a machine-learning algorithm that determines the peak start and stop points, and calculates the area bounded by those points and the intensity (height). The resulting integrated value is the abundance, which then feeds into machine-learning and statistical analyses training and data sets.

[1258] In some examples, machine-learning output, in one instance, is used as machine-learning input in another instance. For example, in addition to the PCA being used for a classification process, the DNN data processing feeds into PCA and other analyses. This results in at least three levels of algorithmic processing. Other hierarchical structures are contemplated within the scope of the instant disclosure.

[1259] In some examples, the methods include comparing the amount of each glycan or glycopeptide quantified in the sample to corresponding reference values for each glycan or glycopeptide in a predictive algorithm. In some examples, the methods include a comparative process by which the amount of a glycan or glycopeptide quantified in the sample is compared to a reference value for the same glycan or glycopeptide using a predictive algorithm. The comparative process may be part of a classification by a predictive algorithm. The comparative process may occur at an abstract level, e.g., in n-dimensional feature space or in a higher dimensional space.

[1260] In some examples, the methods herein include classifying a patient's sample based on the amount of each glycan or glycopeptide quantified in the sample with a predictive algorithm. In some examples, the methods include using statistical or machine-learning classification processes by which the amount of a glycan or glycopeptide quantified in the test sample is used to determine a category of health with a predictive algorithm. In some examples, the predictive algorithm is a statistical or machine-learning classification algorithm.

[1261] In some examples, classification by a predictive algorithm may include scoring likelihood of a panel of glycan or glycopeptide values belonging to each possible category, and determining the highest-scoring category. Classification by a predictive algorithm may include comparing a panel of marker values to previous observations by means of a distance function. Examples of predictive algorithms suitable for classification include random forests, support vector machines, logistic regression (e.g. multiclass or multinomial logistic regression, and/or algorithms adapted for sparse logistic regression). A wide variety of other predictive algorithms that are suitable for classification may be used, as known to a person skilled in the art.

[1262] In some examples, the methods herein include supervised learning of a predictive algorithm on the basis of values for each glycan or glycopeptide obtained from a population of individuals having a disease or condition (e.g., melanoma or NSCLS). In some examples, the methods include variable selection in a statistical model on the basis of values for each glycan or glycopeptide obtained from a population of individuals having the disease or condition. Training a predictive algorithm may for example include determining a weighting vector in feature space for each category, or determining a function or function parameters.

[1263] In one embodiment, the reference value is the amount of a glycan or glycopeptide in a sample or samples derived from one individual. Alternatively, the reference value may be derived by pooling data obtained from multiple individuals, and calculating an average (for example, mean or median) amount for a glycan or glycopeptide. Thus, the reference value may reflect the average amount of a glycan or glycopeptide in multiple individuals. Said amounts may be expressed in absolute or relative terms, in the same manner as described herein.

[1264] In some examples, the reference value may be derived from the same sample as the sample that is being tested, thus allowing for an appropriate comparison between the two. For example, if the sample is derived from urine, the reference value is also derived from urine. In some examples, if the sample is a blood sample (e.g. a plasma or a serum sample), then the reference value will also be a blood sample (e.g. a plasma sample or a serum sample, as appropriate). When comparing between the sample and the reference value, the way in which the amounts are expressed is matched between the sample and the reference value. Thus, an absolute amount can be compared with an absolute amount, and a relative amount can be compared with a relative amount. Similarly, the way in which the amounts are expressed for classification with the predictive algorithm is matched to the way in which the amounts are expressed for training the predictive algorithm.

[1265] When the amounts of the glycan or glycopeptide are determined, the method may comprise comparing the amount of each glycan or glycopeptide to its corresponding reference value. When the cumulative amount of one, some or all the glycan or glycopeptides are determined, the method may comprise comparing the cumulative amount to a corresponding reference value. When the amounts of the glycan or glycopeptides are combined with each other in a formula to form an index value, the index value can be compared to a corresponding reference index value derived in the same manner.

[1266] The reference values may be obtained either within (i.e., constituting a step of) or external to the (i.e., not constituting a step of) methods described herein. In some examples, the methods include a step of establishing a reference value for the quantity of the markers. In other examples, the reference values are obtained externally to the method described herein and accessed during the comparison step of the invention.

[1267] In certain embodiments, the lasso regression machine-learning model may be a regression model or other classification model that may be evaluated utilizing receiver operating characteristic (ROC) evaluation and/or area under curve (AOC) evaluation. For example, in certain embodiments, as will be further illustrated with respect to FIGS. 73A, 73B, 74A, 74B, the ROC model evaluation may represent a plot of sensitivity rate (e.g., patient likely not responsive) against a plot of specificity rate (patient likely to be responsive) and may be further optimized based on an iterative tuning of hyperparameters of the lasso regression machine-learning model. The trained the lasso regression machine-learning model may be then utilized to predict patient overall survival (OS) and progression-free survival (PFS) patients with metastatic melanoma for various glycopeptide fragments and patients with non-small-cell lung cancer (NSCLC) for various glycopeptide fragments, in accordance with the presently disclosed embodiments.

[1268] In some examples, including any of the foregoing, training of a predictive algorithm may be obtained either within (i.e., constituting a step of) or external to (i.e., not constituting a step of) the methods set forth herein. In some examples, the methods include a step of training of a predictive algorithm. In some examples, the predictive algorithm is trained externally to the method herein and accessed during the classification step of the invention. The reference value may be determined by quantifying the amount of a glycan or glycopeptide in a sample obtained from a population of healthy individual(s). The predictive algorithm may be trained by quantifying the amount of a glycan or glycopeptide in a sample obtained from a population of healthy individual(s). As used herein, the term “healthy individual” refers to an individual or group of individuals who are in a healthy state, e.g., patients who have not shown any symptoms of the disease, have not been diagnosed with the disease and/or are not likely to develop the disease. Preferably said healthy individual(s) is not on medication affecting the disease and has not been diagnosed with any other disease. The one or more healthy individuals may have a similar sex, age and body mass index (BMI) as compared with the test individual. The reference value may be determined by quantifying the amount of a glycan or glycopeptide in a sample obtained from a population of individual(s) suffering from the disease. The predictive algorithm may be trained by quantifying the amount of a marker in a sample obtained from a population of individual(s) suffering from the disease. More preferably such individual(s) may have similar sex, age and body mass index (BMI) as compared with the test individual. The reference value may be obtained from a population of individuals suffering from cancer. The predictive algorithm may be trained by quantifying the amount of a glycan or glycopeptide in a sample obtained from a population of individuals suffering from cancer. Once the characteristic glycan or glycopeptide profile of cancer is determined, the profile of markers from a biological sample obtained from an individual may be compared to this reference profile to determine whether the test subject also has cancer. Once the predictive algorithm is trained to classify cancer, the profile of markers from a biological sample obtained from an individual may be classified by the predictive algorithm to determine whether the test subject is also at that particular stage of cancer.

### Kits

[1269] In some examples, including any of the foregoing, set forth herein is a kit comprising a glycopeptide standard, a buffer, and one or more glycopeptides consisting of an amino acid sequence selected from the group consisting of SEQ ID NO: 673-703, 731-779, and 570-595.

[1270] In some examples, including any of the foregoing, set forth herein is a kit comprising a glycopeptide standard, a buffer, and one or more glycopeptides consisting essentially of an amino acid sequence selected from the group consisting of SEQ ID NO: 673-703, 731-779, and 570-595.

[1271] In some examples, set forth herein is a kit comprising a glycopeptide standard, a buffer, and one or more glycopeptides consisting of an amino acid sequence selected from the group consisting of SEQ ID NO: 673-703, 731-779, and 570-595, and combinations thereof. In some examples, set forth herein is a kit comprising a glycopeptide standard, a buffer, and one or more glycopeptides consisting essentially of an amino acid sequence selected from the group consisting of SEQ ID NO: 673-703. In some examples, set forth herein is a kit comprising a glycopeptide standard, a buffer, and one or more glycopeptides consisting essentially of an amino acid sequence selected from the group consisting of SEQ ID NO: 731-779. In some examples, set forth herein is a kit comprising a glycopeptide standard, a buffer, and one or more glycopeptides consisting essentially of an amino acid sequence selected from the group consisting of SEQ ID NO: 570-595.

[1272] In some examples, set forth herein is a kit for diagnosing or monitoring cancer in an individual wherein the glycan or glycopeptide profile of a sample from said individual is determined and the measured profile is compared with a profile of a normal patient or a profile of a patient with a family history of cancer. In some examples, the kit comprises one or more glycopeptides consisting of an amino acid sequence selected from the group consisting SEQ ID NO: 673-703, 731-779, and 570-595. In some examples, the kit comprises one or more glycopeptides consisting essentially of an amino acid sequence selected from the group consisting of SEQ ID NO: 673-703, 731-779, and 570-595.

[1273] In some examples, set forth herein is a kit comprising the reagents for quantification of the oxidized, nitrated, and/or glycated free adducts derived from glycopeptides.

### Clinical Assays

[1274] In some examples, the biomarkers, methods, and/or kits may be used in a clinical setting for diagnosing patients. In some of these examples, the analysis of samples includes the use of internal standards. These standards may include one or more glycopeptides consisting of an amino acid sequence selected from the group consisting of SEQ ID NO: 673-703, 731-779, and 570-595. These standards may include one or more glycopeptides consisting essentially of an amino acid sequence selected from the group consisting of SEQ ID NO: 673-703, 731-779, and 570-595.

[1275] In a clinical setting, samples may be prepared (e.g., by digestion) to include one or more glycopeptides consisting of an amino acid sequence selected from the group consisting of SEQ ID NO: 673-703, 731-779, and 570-595. In a clinical setting, samples may be prepared (e.g., by digestion) to include one or more glycopeptides consisting essentially of an amino acid sequence selected from the group consisting of SEQ ID NO: 673-703, 731-779, and 570-595. In some examples, the amount of a glycan or glycopeptide may be assessed by comparing the amount of one or more glycopeptides consisting of an amino acid sequence selected from the group consisting of SEQ ID NO: 673-703, 731-779, and 570-595 to the concentration of another biomarker. In some examples, the amount of a glycan or glycopeptide may be assessed by comparing the amount of one or more glycopeptides consisting essentially of an amino acid sequence selected from the group consisting of SEQ ID NO: 673-703, 731-779, and 570-595 to the concentration of another biomarker.

[1276] In some examples, the amount of a glycan or glycopeptide may be assessed by comparing the amount of one or more glycopeptides consisting of an amino acid sequence selected from the group consisting of SEQ ID NOs: 826-955 the amount of one or more glycopeptides consisting of an amino acid sequence selected from the group consisting of SEQ ID NOs: 826-955.

[1277] In some examples, the amount of a glycan or glycopeptide may be assessed by comparing the amount of one or more glycopeptides consisting essentially of an amino acid sequence selected from the group consisting of SEQ ID NO: 673-703, 731-779, and 570-595 to the amount of one or more glycopeptides consisting essentially of an amino acid sequence selected from the group consisting of SEQ ID NO: 673-703, 731-779, and 570-595.

[1278] In some examples, including any of the foregoing, the kit may include software for computing the normalization of a glycopeptide MRM transition signal.

[1279] In some examples, including any of the foregoing, the kit may include software for quantifying the amount of a glycopeptide consisting of, or consisting essentially of, an amino acid sequence selected from the group consisting of SEQ ID NO: 673-703, 731-779, and 570-595. In some examples, including any of the foregoing, the kit may include software for quantifying the relative amount of a glycopeptide consisting of, or consisting essentially of, an amino acid sequence selected from the group consisting of SEQ ID NO: 673-703, 731-779, and 570-595.

[1280] In some examples, including any of the foregoing, a trained model is stored on a server which is accessed by a clinician performing a method, set forth herein. In some examples, the clinician inputs the quantification of the MRM transition signals from a patient's sample into a trained model which are stored on a server. In some examples, the server is accessed by the internet, wireless communication, or other digital or telecommunication methods.

[1281] In some examples, including any of the foregoing, a trained model is stored on a server which is accessed by a clinician performing a method, set forth herein. In some examples, the clinician inputs the quantification of the glycopeptide or glycopeptides consisting of, or consisting essentially of, an amino acid sequence selected from the group consisting of SEQ ID NO: 673-703, 731-779, and 570-595 from a patient's sample into a trained model which are stored on a server. In some examples, the server is accessed by the internet, wireless communication, or other digital or telecommunication

[1282] Individual KM curves may be plotted for the markers relevant in for the disease interest in four files. Hazard ratios and p-values on the plots are representative of the plotted high/low split at median biomarker expression. FIGS. 73A and 73B show progression-free survival (PFS) Kaplan-Meier curves of patients with metastatic melanoma for various glycopeptide fragments. FIGS. 74A and 74B show progression-free survival (PFS) Kaplan-Meier curves of patients with non-small-cell lung cancer (NSCLC) for various glycopeptide fragments. FIGS. 75-100 show overall survival (OS) Kaplan-Meier curves of patients with metastatic melanoma for various glycopeptide fragments of interest for melanoma. FIGS. 101-139 show progression-free survival (PFS) Kaplan-Meier curves of patients with metastatic melanoma for various glycopeptide fragments for melanoma.

### IV. Additional Proteins and Glycopeptides

TABLE 66
Glycopeptides associated with melanoma

| | | | | Link- | |
|---|---|---|---|---|---|
| | | | | ing | |
| | | | | Site | |
| | | | | Pos. | |
| | | | | in | |
| | | | | Pep- | Glycan |
| SEQ | Trans- | Peptide | | tide | Struc- |
| ID | ition | Structure | Peptide | Se- | ture |
| NO: | Number | (PS) NAME | Sequence | quence | GL NO. |
| 673 | 673 | QUANTPEP. | DLLLPQPD | N/A | N/A |
| | | A2GL_DL | LR | | |
| | | LLPQPDLR | | | |
| 674 | 674 | QUANTPEP. | SLDFTELD | N/A | N/A |
| | | ANGT_SLDF | VAAEK | | |
| | | TELDVAAEK | | | |
| 675 | 675 | A1AT_ | QLAHQSNS | 1 | 5412 |
| | | 70_5412 | TNIFFSPV | | |
| | | | SIATAFAM | | |
| | | | LSLGTK | | |
| 676 | 676 | HPT_ | MVSHHNLT | 1 | 5412 |
| | | 184_5412 | TGATLINE | | |
| | | | QWLLTTAK | | |
| 677 | 677 | HPT_ | VVLHPNYS | 3 | 6513 |
| | | 241_6513 | QVDIGLIK | | |
| 678 | 678 | HEMO_ | SWPAVGNC | 2 | 5412 |
| | | 187_5412 | SSALR | | |
| 679 | 679 | IC1_ | VATTVISK | 1 | 1102 |
| | | 48_1102 | | | |
| 680 | 680 | HPT_ | MVSHHNLT | 1 | 6513 |
| | | 184_6513 | TGATLINE | | |
| | | | QWLLTTAK | | |
| 681 | 681 | APOC3_74_ | FSEFWDLD | 1 | N/A |
| | | NONGLYCO- | PEVRPTSA | | |
| | | SYLATED | VAA | | |
| 682 | 682 | IGM_ | GLTFQQNA | 2 | 5500 |
| | | 209_5500 | SSMCVPDQ | | |
| | | | DTAIR | | |
| 683 | 683 | FETUA_ | VCQDCPLL | 1 | 5412 |
| | | 156_5412 | APLNDTR | | |
| 684 | 684 | QUANTPEP. | VNHVTLSQ | 1 | |
| | | B2M_VNHV | PK | | |
| | | TLSQPK | | | |
| 685 | 685 | IC1_ | VLSNNSDA | 3 | 5412 |
| | | 253_5412 | NLELINTW | | |
| | | | VAK | | |
| 686 | 686 | CERU_ | EHEGAIYP | 1 | 5412 |
| | | 138_5412 | DNTTDFQR | | |
| 687 | 687 | IGM_ | GLTFQQNA | 2 | 5501 |
| | | 209_5501 | SSMCVPDQ | | |
| | | | DTAIR | | |
| 688 | 688 | THRB_ | WVLTAAHC | 3 | 5402 |
| | | 416MC_ | LLYPPWDK | | |
| | | 5402 | NFTENDLL | | |
| | | | VR | | |
| 689 | 689 | TRFE_ | QQQHLFGS | 2 | 5412 |
| | | 630_5412 | NVTDCSGN | | |
| | | | FCLFR | | |
| 690 | 690 | FETUA_ | AALAAFNA | 2 | 6501 |
| | | 176_6501 | QNNGSNFQ | | |
| | | | LEEISR | | |
| 691 | 691 | CO5_ | ANISHK | 1 | 5412 |
| | | 741_5412 | | | |
| 692 | 692 | FETUA_ | AALAAFNA | 2 | 5412 |
| | | 176_5412 | QNNGSNFQ | | |
| | | | LEEISR | | |
| 693 | 693 | CFAH_ | ISEENETT | 3 | 5401 |
| | | 911_5401 | CYMGK | | |
| 694 | 694 | IGG1_ | EEQYNSTY | 1 | 4511 |
| | | 297_4511 | R | | |
| 695 | 695 | A2MG_ | IITILEEE | 2 | 5200 |
| | | 247_5200 | MNVSVCGL | | |
| | | | YTYGKPVP | | |
| | | | GHVTVSIC | | |
| | | | R | | |
| 696 | 696 | CERU_ | EHEGAIYP | 1 | 5402 |
| | | 138_5402 | DNTTDFQR | | |
| 697 | 697 | IGA2_ | TPLTANIT | 1 | 4510 |
| | | 205_4510 | K | | |
| 698 | 698 | HRG_ | VIDFNCTT | 1 | 5402 |
| | | 125_5402 | SSVSSALA | | |
| | | | NTK | | |
| 699 | 699 | HPT_207_ | NLFLNHSE | 2 | 121005 |
| | | 121005 | NATAK | | |
| 700 | 700 | AACT_ | FNLTETSE | 1 | 7604 |
| | | 106_7604 | AEIHQSFQ | | |
| | | | HLLR | | |
| 701 | 701 | CERU_ | ENLTAPGS | 3 | 6503 |
| | | 397_6503 | DSAVFFEQ | | |
| | | | GTTR | | |
| 702 | 702 | HPT_ | NLFLNHSE | 2 | 11904 |
| | | 207_11904 | NATAK | | |

TABLE 67
Glycoproteins Associated with Melanoma

| SEQ | Protein | | Uniprot |
|---|---|---|---|
| ID NO. | Abbreviation | Protein Name | ID |
| 704 | A2GL | Leucine-richAlpha- | P02750 |
| | | 2-glycoprotein | |
| 705 | ANGT | P01019\|Angiotensinogen | P01019 |
| 706 | HPT | Haptoglobin | P00738 |
| 707 | HEMO | Hemopexin | P02790 |
| 708 | IC1 | Plasma protease C1 inhibitor | P05155 |
| 709 | HPT | Haptoglobin | P00738 |
| 710 | APOC3 | Apolipoprotein C-III | P02656 |
| 711 | IGM | Immunoglobulin heavy | P01871 |
| | | constant mu | |
| 712 | FETUA | Alpha-2-HS-glycoprotein | P02765 |
| 713 | B2M | Beta-2-microglobulin | P61769 |
| 714 | IC1 | Plasma protease C1 inhibitor | P05155 |
| 715 | CERU | Ceruloplasmin | P00450 |
| 716 | IGM | Immunoglobulin heavy | P01871 |
| | | constant mu | |
| 717 | THRB | Prothrombin | P00734 |
| 718 | TRFE | Serotransferrin | P02787 |
| 719 | FETUA | Alpha-2-HS-glycoprotein | P02765 |
| 720 | CO5 | ComplementC5 | P01031 |
| 721 | FETUA | Alpha-2-HS-glycoprotein | P02765 |
| 722 | CFAH | ComplementFactorH | P08603 |
| 723 | IGG1 | Immunoglobulin heavy | P01857 |
| | | constant gamma 1 | |
| 724 | A2MG | Alpha-2-macroglobulin | P01023 |
| 725 | CERU | Ceruloplasmin | P00450 |
| 726 | IGA2 | Immunoglobulin heavy | P01877 |
| | | constant alpha 2 | |
| 727 | HRG | Histidine-rich Glycoprotein | P04196 |
| 728 | HPT | Haptoglobin | P00738 |
| 729 | AACT | Alpha-1-antichymotrypsin | P01011 |
| 730 | HPT | Haptoglobin | P00738 |

TABLE 68
Glycopeptides Associated with NSCLC

| | | | | Linking | |
|---|---|---|---|---|---|
| SEQ | Trans- | Peptide | | Site Pos. | Glycan |
| ID | ition | Structure | Peptide | in Peptide | Structure |
| NO: | Number | (PS) NAME | Sequence | Sequence | GL NO. |
| 731 | 731 | TRFE_630_6513 | QQQHLFGSNVTDCSG | 9 | 6513 |
| | | | NFCLFR | | |
| 732 | 732 | AGP1_93_6503 | QDQCIYNTTYLNVQR | 7 | 6503 |
| 733 | 733 | IGG2_297_5510 | EEQFNSTFR | 5 | 5510 |
| 734 | 734 | IGG1_297_5410 | EEQYNSTYR | 5 | 5410 |
| 735 | 735 | AACT_271_6502 | YTGNASALFILPDQDK | 4 | 6502 |
| 736 | 736 | AGP1_103_6503 | ENGTISR | 2 | 6503 |
| 737 | 737 | IGG1_297_3410 | EEQYNSTYR | 5 | 3410 |
| 738 | 738 | IGG1_297_5510 | EEQYNSTYR | 5 | 5510 |
| 739 | 739 | VTNC_86_6503 | NNATVHEQVGGPSLT | 2 | 6503 |
| | | | SDLQAQSK | | |
| 740 | 740 | HPT_241_6513 | VVLHPNYSQVDIGLIK | 6 | 6513 |
| 741 | 741 | CERU_762_6523 | ELHHLQEQNVSNAFL | 9 | 6523 |
| | | | DK | | |
| 742 | 742 | HRG_345_5412 | HSHNNNSSDLHPHK | 6 | 5412 |
| 743 | 743 | HPT_207_5401 | NLFLNHSENATAK | 5 | 5401 |
| 744 | 744 | AGP1_93_8704 | QDQCIYNTTYLNVQR | 7 | 8704 |
| 745 | 745 | HRG_125_5402 | VIDFNCTTSSVSSALA | 5 | 5402 |
| | | | NTK | | |
| 746 | 746 | A1AT_271_5401 | YLGNATAIFFLPDEGK | 4 | 5401 |
| 747 | 747 | KNG1_205_5412 | ITYSIVQTNCSK | 9 | 5412 |
| 748 | 748 | TRFE_432_5401 | CGLVPVLAENYNK | 12 | 5401 |
| 749 | 749 | IGG2_297_5410 | EEQFNSTFR | 5 | 5410 |
| 750 | 750 | TRFE_630_5400 | QQQHLFGSNVTDCSG | 9 | 5400 |
| | | | NFCLFR | | |
| 751 | 751 | AGP1_93_7603 | QDQCIYNTTYLNVQR | 7 | 7603 |
| 752 | 752 | CERU_762_6512 | ELHHLQEQNVSNAFL | 9 | 6512 |
| | | | DK | | |
| 753 | 753 | A1AT_107_6502 | ADTHDEILEGLNFNLT | 14 | 6502 |
| | | | EIPEAQIHEGFQELLR | | |
| 754 | 754 | KLKB1_494_5400 | LQAPLNYTEFQKPICL | 6 | 5400 |
| | | | PSK | | |
| 755 | 755 | IGG1_297_5411 | EEQYNSTYR | 5 | 5411 |
| 756 | 756 | HPT_207_121005 | NLFLNHSENATAK | 5, 9 | 121005 |
| 757 | 757 | FETUA_176_5412 | AALAAFNAQNNGSNF | 11 | 5412 |
| | | | QLEEISR | | |
| 758 | 758 | HPT_241_5412 | VVLHPNYSQVDIGLIK | 6 | 5412 |
| 759 | 759 | CFAH_882_5401 | IPCSQPPQIEHGTINSSR | 15 | 5401 |
| 760 | 760 | AGP1_93_6502 | QDQCIYNTTYLNVQR | 7 | 6502 |
| 761 | 761 | IC1_352_5412 | VGQLQLSHNLSLVILV | 9 | 5412 |
| | | | PQNLK | | |
| 762 | 762 | HEMO_187_NON- | SWPAVGNCSSALR | 7 | NONGLY- |
| | | GLYCOSYLATED | | | COSYL- |
| | | | | | ATED |
| 763 | 763 | KLKB1_396_5401 | IVGGTNSSWGEWPWQ | 6 | 5401 |
| | | | VSLQVK | | |
| 764 | 764 | IGJ_71_5412 | ENISDPTSPLR | 2 | 5412 |
| 765 | 765 | AGP12_72MC_ | SVQEIQATFFYFTPNK | 15 | 7614 |
| | | 7614 | TEDTIFLR | | |
| 766 | 766 | TRFE_630_5401 | QQQHLFGSNVTDCSG | 9 | 5401 |
| | | | NFCLFR | | |
| 767 | 767 | TRFE_630_5411 | QQQHLFGSNVTDCSG | 9 | 5411 |
| | | | NFCLFR | | |
| 768 | 768 | IGM_209_5512 | GLTFQQNASSMCVPD | 7 | 5512 |
| | | | QDTAIR | | |
| 769 | 769 | KNG1_137_ | FSVATQTCQITPAEGP | N/A | NONGLY- |
| | | NONGLYCO- | VVTAQYDCLGCVHPIS | | COSYL- |
| | | SYLATED | TQSPDLEPILR | | ATED |
| 770 | 770 | FHR1_126_5402 | LQNNENNISCVER | 7 | 5402 |
| 771 | 771 | IGG1_297_4500 | EEQYNSTYR | 5 | 4500 |
| 772 | 772 | AGP1_93_7612 | QDQCIYNTTYLNVQR | 7 | 7612 |
| 773 | 773 | A1AT_271_5402 | YLGNATAIFFLPDEGK | 4 | 5402 |
| 774 | 774 | A1AT_271_6503 | YLGNATAIFFLPDEGK | 4 | 6503 |
| 775 | 775 | KNG1_294_5412 | LNAENNATFYFK | 6 | 5412 |
| 776 | 776 | CO2_621_6200 | QSVPAHFVALNGSK | 11 | 6200 |
| 777 | 777 | HRG_271_2202 | SSTTKPPFKPHGSR | 1 | 2202 |
| 778 | 778 | APOD_98_5412 | ADGTVNQIEGEATPVN | 16 | 5412 |
| | | | LTEPAK | | |
| 779 | 779 | AFAM_33_5402 | DIENFNSTQK | 6 | 5402 |

TABLE 69
Glycoproteins associated with NSCLC

| SEQ | Protein | | |
|---|---|---|---|
| ID NO. | Abbreviation | Protein Name | Uniprot ID |
| 780 | TRFE | Serotransferrin | P02787 |
| 781 | AGP1 | Alpha-1-acid glycoprotein 1 | P02763 |
| 782 | IGG2 | Immunoglobulin heavy | P01859 |
| | | constant gamma 2 | |
| 783 | IGG1 | Immunoglobulin heavy | P01857 |
| | | constant gamma 1 | |
| 784 | AACT | Alpha-1-antichymotrypsin | P01011 |
| 785 | AGP1 | Alpha-1-acid glycoprotein 1 | P02763 |
| 786 | IGG1 | Immunoglobulin heavy | P01857 |
| | | constant gamma 1 | |
| 787 | VTNC | Vitronectin | P04004 |
| 788 | HPT | Haptoglobin | P00738 |
| 789 | CERU | Ceruloplasmin | P00450 |
| 790 | HRG | Histidine-rich Glycoprotein | P04196 |
| 791 | HPT | Haptoglobin | P00738 |
| 792 | AGP1 | Alpha-1-acid glycoprotein 1 | P02763 |
| 793 | HRG | Histidine-rich Glycoprotein | P04196 |
| 794 | A1AT | Alpha-1-antitrypsin | P01009 |
| 795 | KNG1 | Kininogen-1 | P01042 |
| 796 | TRFE | Serotransferrin | P02787 |
| 797 | IGG2 | Immunoglobulin heavy | P01859 |
| | | constant gamma 2 | |
| 798 | TRFE | Serotransferrin | P02787 |
| 799 | AGP1 | Alpha-1-acid glycoprotein 1 | P02763 |
| 800 | CERU | Ceruloplasmin | P00450 |
| 801 | A1AT | Alpha-1-antitrypsin | P01009 |
| 802 | KLKB1 | Plasma Kallikrein | P03952 |
| 803 | IGG1 | Immunoglobulin heavy | P01857 |
| | | constant gamma 1 | |
| 804 | HPT | Haptoglobin | P00738 |
| 805 | FETUA | Alpha-2-HS-glycoprotein | P02765 |
| 806 | HPT | Haptoglobin | P00738 |
| 807 | CFAH | Complement Factor H | P08603 |
| 808 | AGP1 | Alpha-1-acid glycoprotein 1 | P02763 |
| 809 | IC1 | Plasma protease C1 inhibitor | P05155 |
| 810 | HEMO | Hemopexin | P02790 |
| 811 | KLKB1 | Plasma Kallikrein | P03952 |
| 812 | IGJ | Immunoglobulin J chain | P01591 |
| 813 | AGP1&2 | Alpha-1-acid | P02763&P19652 |
| | | glycoprotein 1&2 | |
| 814 | TRFE | Serotransferrin | P02787 |
| 815 | IGM | Immunoglobulin heavy | P01871 |
| | | constant mu | |
| 816 | KNG1 | Kininogen-1 | P01042 |
| 817 | FHR1 | Complement factor | Q03591 |
| | | H-related protein 1 | |
| 818 | IGG1 | Immunoglobulin heavy | P01857 |
| | | constant gamma 1 | |
| 819 | AGP1 | Alpha-1-acid glycoprotein 1 | P02763 |
| 820 | A1AT | Alpha-1-antitrypsin\|A1AT | P01009 |
| 821 | KNG1 | Kininogen-1\|KNG1 | P01042 |
| 822 | CO2 | ComplementC2 | P06681 |
| 823 | HRG | Histidine-rich Glycoprotein | P04196 |
| 824 | APOD | Apolipoprotein D | P05090 |
| 825 | AFAM | Afamin | P43652 |

TABLE 70
Glycopeptides

| | | | | | Linking | |
|---|---|---|---|---|---|---|
| Pept | | | | | Site | |
| SEQ | Peptide | Protein | Prot | | Pos. in | Glycan |
| ID | Structure | Abbrevi- | SEQ | Peptide | Protein | Structure |
| NO: | (PS) Name | ation | ID | Sequence | Sequence | GL NO. |
| 826 | A1AT_70_5412 | A1AT | 956 | QLAHQSNSTNIFFSP | 70 | 5412 |
| | | | | VSIATAFAMLSLGT | | |
| | | | | K | | |
| 827 | AFAM_33_5402 | AFAM | 991 | DIENFNSTQK | 33 | 5402 |
| 828 | AGP1_93_6502 | AGP1 | 975 | QDQCIYNTTYLNVQ | 93 | 6502 |
| | | | | R | | |
| 829 | AGP12_72MC_ | AGP1 | 975 | SVQEIQATFFYFTPN | 72 | 7614 |
| | 7614 | AGP2 | 996 | KTEDTIFLR | | |
| 830 | CFAH_911_540 | CFAH | 987 | ISEENETTCYMGK | 911 | 5401 |
| | 1 | | | | | |
| 831 | HPT_207_10803 | HPT | 962 | NLFLNHSENATAK | 207 | 10803 |
| 832 | HPT_207_5401 | HPT | 962 | NLFLNHSENATAK | 207 | 5401 |
| 833 | HPT_241_5412 | HPT | 962 | VVLHPNYSQVDIGLI | 241 | 5412 |
| | | | | K | | |
| 834 | IGG1_297_5400 | IGG1 | 969 | EEQYNSTYR | 297 | 5400 |
| 835 | TRFE_630_5400 | TRFE | 977 | QQQHLFGSNVTDCS | 630 | 5400 |
| | | | | GNFCLFR | | |
| 836 | AGP1_33_6503 | AGP1 | 975 | QIPLCANLVPVPITN | 33 | 6503 |
| | | | | ATLDQITGK | | |
| 837 | UN13A_1005_7 | UN13A | 995 | ACLNSTYEYIFNNC | 1005 | 7512 |
| | 512 | | | HELYSR | | |
| 838 | A1AT_107_650 | A1AT | 956 | ADTHDEILEGLNFN | 107 | 6502 |
| | 2 | | | LTEIPEAQIHEGFQE | | |
| | | | | LLR | | |
| 839 | A1AT_271_540 | A1AT | 956 | YLGNATAIFFLPDEG | 271 | 5401 |
| | 1 | | | K | | |
| 840 | A1AT_271_540 | A1AT | 956 | YLGNATAIFFLPDEG | 271 | 5402 |
| | 2 | | | K | | |
| 841 | A1AT_271_650 | A1AT | 956 | YLGNATAIFFLPDEG | 271 | 6503 |
| | 3 | | | K | | |
| 842 | A2MG_247_520 | A2MG | 965 | IITILEEEMNVSVCG | 247 | 5200 |
| | 0 | | | LYTYGKPVPGHVTV | | |
| | | | | SICR | | |
| 843 | A2MG_869_520 | A2MG | 965 | SLGNVNFTVSAEAL | 869 | 5200 |
| | 0 | | | ESQELCGTEVPSVPE | | |
| | | | | HGR | | |
| 844 | A2MG_869_620 | A2MG | 965 | SLGNVNFTVSAEAL | 869 | 6200 |
| | 0 | | | ESQELCGTEVPSVPE | | |
| | | | | HGR | | |
| 845 | AACT_106_760 | AACT | 963 | FNLTETSEAEIHQSF | 106 | 7604 |
| | 4 | | | QHLLR | | |
| 846 | AACT_127_540 | AACT | 963 | TLNQSSDELQLSMG | 127 | 5401 |
| | 1 | | | NAMFVK | | |
| 847 | AACT_271_650 | AACT | 963 | YTGNASALFILPDQ | 271 | 6502 |
| | 2 | | | DK | | |
| 848 | AACT_271_760 | AACT | 963 | YTGNASALFILPDQ | 271 | 7602 |
| | 2 | | | DK | | |
| 849 | AACT_271_760 | AACT | 963 | YTGNASALFILPDQ | 271 | 7603 |
| | 3 | | | DK | | |
| 850 | AGP1_103_650 | AGP1 | 975 | ENGTISR | 103 | 6503 |
| | 3 | | | | | |
| 851 | AGP1_33_6502 | AGP1 | 975 | QIPLCANLVPVPITN | 33 | 6502 |
| | | | | ATLDQITGK | | |
| 852 | AGP1_33_6503 | AGP1 | 975 | QIPLCANLVPVPITN | 33 | 6503 |
| | | | | ATLDQITGK | | |
| 853 | AGP1_93_6503 | AGP1 | 975 | QDQCIYNTTYLNVQ | 93 | 6503 |
| | | | | R | | |
| 854 | AGP1_93_7603 | AGP1 | 975 | QDQCIYNTTYLNVQ | 93 | 7603 |
| | | | | R | | |
| 855 | AGP1_93_7612 | AGP1 | 975 | QDQCIYNTTYLNVQ | 93 | 7612 |
| | | | | R | | |
| 856 | AGP1_93_8704 | AGP1 | 975 | QDQCIYNTTYLNVQ | 93 | 8704 |
| | | | | R | | |
| 857 | APOC3_74_ | APOC3 | 973 | FSEFWDLDPEVRPTS | 74 | NON- |
| | NON-GLYCO- | | | AVAA | | GLYCO- |
| | SYLATED | | | | | SYLATED |
| 858 | APOD_98_5412 | APOD | 982 | ADGTVNQIEGEATP | 98 | 5412 |
| | | | | VNLTEPAK | | |
| 859 | CERU_138_540 | CERU | 960 | EHEGAIYPDNTTDF | 138 | 5402 |
| | 2 | | | QR | | |
| 860 | CERU_138_541 | CERU | 960 | EHEGAIYPDNTTDF | 138 | 5412 |
| | 2 | | | QR | | |
| 861 | CERU_397_650 | CERU | 960 | ENLTAPGSDSAVFFE | 397 | 6503 |
| | 3 | | | QGTTR | | |
| 862 | CERU_762_651 | CERU | 960 | ELHHLQEQNVSNAF | 762 | 6512 |
| | 2 | | | LDK | | |
| 863 | CERU_762_652 | CERU | 960 | ELHHLQEQNVSNAF | 762 | 6523 |
| | 3 | | | LDK | | |
| 864 | CFAH_1029_54 | CFAH | 987 | MDGASNVTCINSR | 1029 | 5401 |
| | 01 | | | | | |
| 865 | CFAH_1029_54 | CFAH | 987 | MDGASNVTCINSR | 1029 | 5402 |
| | 02 | | | | | |
| 866 | CFAH_882_540 | CFAH | 987 | IPCSQPPQIEHGTINS | 882 | 5401 |
| | 1 | | | SR | | |
| 867 | CLUS_374_650 | CLUS | 988 | LANLTQGEDQYYLR | 374 | 6501 |
| | 1 | | | | | |
| 868 | CO2_621_6200 | CO2 | 985 | QSVPAHFVALNGSK | 621 | 6200 |
| 869 | CO5_741_5412 | CO5 | 966 | ANISHK | 741 | 5412 |
| 870 | CO8B_243_661 | CO8B | 986 | EYESYSDFERNVTE | 243 | 6610 |
| | 0 | | | K | | |
| 871 | CO8B_553_541 | CO8B | 986 | WNCWSNWSSCSGR | 553 | 5410 |
| | 0 | | | | | |
| 872 | FETUA_156_54 | FETUA | 976 | VCQDCPLLAPLNDT | 156 | 5402 |
| | 02 | | | R | | |
| 873 | FETUA_156_54 | FETUA | 976 | VCQDCPLLAPLNDT | 156 | 5412 |
| | 12 | | | R | | |
| 874 | FETUA_176_54 | FETUA | 976 | AALAAFNAQNNGS | 176 | 5412 |
| | 12 | | | NFQLEEISR | | |
| 875 | FETUA_176_65 | FETUA | 976 | AALAAFNAQNNGS | 176 | 6501 |
| | 01 | | | NFQLEEISR | | |
| 876 | FHR1_126_5402 | FHR1 | 993 | LQNNENNISCVER | 126 | 5402 |
| 877 | HEMO_187_541 | HEMO | 978 | SWPAVGNCSSALR | 187 | 5412 |
| | 2 | | | | | |
| 878 | HEMO_187_ | HEMO | 978 | SWPAVGNCSSALR | 187 | NON- |
| | NON-GLYCO- | | | | | GLYCO- |
| | SYLATED | | | | | SYLATED |
| 879 | HEMO_453_540 | HEMO | 978 | ALPQPQNVTSLLGC | 453 | 5401 |
| | 1 | | | TH | | |
| 880 | HPT_184_5412 | HPT | 962 | MVSHHNLTTGATLI | 184 | 5412 |
| | | | | NEQWLLTTAK | | |
| 881 | HPT_184_5511 | HPT | 962 | MVSHHNLTTGATLI | 184 | 5511 |
| | | | | NEQWLLTTAK | | |
| 882 | HPT_184_6513 | HPT | 962 | MVSHHNLTTGATLI | 184 | 6513 |
| | | | | NEQWLLTTAK | | |
| 883 | HPT_207_11904 | HPT | 962 | NLFLNHSENATAK | 207 | 11904 |
| 884 | HPT_207_12100 | HPT | 962 | NLFLNHSENATAK | 207 | 121005 |
| | 5 | | | | | |
| 885 | HPT_241_5401 | HPT | 962 | VVLHPNYSQVDIGLI | 241 | 5401 |
| | | | | K | | |
| 886 | HPT_241_6513 | HPT | 962 | VVLHPNYSQVDIGLI | 241 | 6513 |
| | | | | K | | |
| 887 | HR_ 125_5401 | HRG | 981 | VIDFNCTTSSVSSAL | 125 | 5401 |
| | | | | ANTK | | |
| 888 | HRG_125_5402 | HRG | 98 | VIDFNCTTSSVSSAL | 125 | 5402 |
| | | | | ANTK | | |
| 889 | HRG_271_2202 | HRG | 981 | SSTTKPPFKPHGSR | 271 | 2202 |
| 890 | HRG_345_5412 | HRG | 981 | HSHNNNSSDLHPHK | 345 | 5412 |
| 891 | IC1_253_5412 | IC1 | 983 | VLSNNSDANLELINT | 253 | 5412 |
| | | | | WVAK | | |
| 892 | IC1_352_5412 | IC1 | 983 | VGQLQLSHNLSL VIL | 352 | 5412 |
| | | | | VPQNLK | | |
| 893 | IC1_48_1102 | IC1 | 983 | VATTVISK | 48 | 1102 |
| 894 | IGA12_144_350 | IGA1 | 555 | LSLHRPALEDLLLGS | 144 | 3500 |
| | 0 | IGA2 | 972 | EANLTCTLTGLR | | |
| 895 | IGA12_144_440 | IGA1 | 555 | LSLHRPALEDLLLGS | 144 | 4401 |
| | 1 | IGA2 | 972 | EANLTCTLTGLR | | |
| 896 | IGA12_144_450 | IGA1 | 555 | LSLHRPALEDLLLGS | 144 | 4500 |
| | 0 | IGA2 | 972 | EANLTCTLTGLR | | |
| 897 | IGA12_144_550 | IGA1 | 555 | LSLHRPALEDLLLGS | 144 | 5501 |
| | 1 | IGA2 | 972 | EANLTCTLTGLR | | |
| 898 | IGA12_144_550 | IGA1 | 555 | LSLHRPALEDLLLGS | 144 | 5502 |
| | 2 | IGA2 | 972 | EANLTCTLTGLR | | |
| 899 | IGA2_205_4510 | IGA2 | 972 | TPLTANITK | 205 | 4510 |
| 900 | IGG1_297_3410 | IGG1 | 969 | EEQYNSTYR | 297 | 3410 |
| 901 | IGG1_297_4400 | IGG1 | 969 | EEQYNSTYR | 297 | 4400 |
| 902 | IGG1_297_4500 | IGG1 | 969 | EEQYNSTYR | 297 | 4500 |
| 903 | IGG1_297_4510 | IGG1 | 969 | EEQYNSTYR | 297 | 4510 |
| 904 | IGG1_297_4511 | IGG1 | 969 | EEQYNSTYR | 297 | 4511 |
| 905 | IGG1_297_5410 | IGG1 | 969 | EEQYNSTYR | 297 | 5410 |
| 906 | IGG1_297_5411 | IGG1 | 969 | EEQYNSTYR | 297 | 5411 |
| 907 | IGG1_297_5510 | IGG1 | 969 | EEQYNSTYR | 297 | 5510 |
| 908 | IGG2_297_4411 | IGG2 | 782 | EEQFNSTFR | 297 | 4411 |
| 909 | IGG2_297_4500 | IGG2 | 782 | EEQFNSTFR | 297 | 4500 |
| 910 | IGG2_297_5410 | IGG2 | 782 | EEQFNSTFR | 297 | 5410 |
| 911 | IGG2_297_5411 | IGG2 | 782 | EEQFNSTFR | 297 | 5411 |
| 912 | IGG2_297_5510 | IGG2 | 782 | EEQFNSTFR | 297 | 5510 |
| 913 | IGG34_297_441 | IGG3 | 563 | EEQYNSTFR | 297 | 4410 |
| | 0 | IGG4 | 970 | | | |
| 914 | IGG34_297_441 | IGG3 | 563 | EEQYNSTFR | 297 | 4411 |
| | 1 | IGG4 | 970 | | | |
| 915 | IGJ_71_5412 | IGJ | 968 | ENISDPTSPLR | 71 | 5412 |
| 916 | IGM_209_5500 | IGM | 971 | GLTFQQNASSMCVP | 209 | 5500 |
| | | | | DQDTAIR | | |
| 917 | IGM_209_5501 | IGM | 97 | GLTFQQNASSMCVP | 209 | 5501 |
| | | | | DQDTAIR | | |
| 918 | IGM_209_5510 | IGM | 971 | GLTFQQNASSMCVP | 209 | 5510 |
| | | | | DQDTAIR | | |
| 919 | IGM_209_5512 | IGM | 971 | GLTFQQNASSMCVP | 209 | 5512 |
| | | | | DQDTAIR | | |
| 920 | ITIH4_517_540 | ITIH4 | 994 | LPTQNITFQTESSVA | 517 | 5401 |
| | 1 | | | EQEAEFQSPK | | |
| 921 | KLKB1_127_54 | KLKB1 | 979 | GVNFNVSK | 127 | 5410 |
| | 10 | | | | | |
| 922 | KLKB1_396_54 | KLKB1 | 979 | IVGGTNSSWGEWP | 396 | 5401 |
| | 01 | | | WQVSLQVK | | |
| 923 | KLKB1_494_54 | KLKB1 | 979 | LQAPLNYTEFQKPIC | 494 | 5400 |
| | 00 | | | LPSK | | |
| 924 | KLKB1_494_54 | KLKB1 | 979 | LQAPLNYTEFQKPIC | 494 | 5410 |
| | 10 | | | LPSK | | |
| 925 | KNG1_137_ | KNG1 | 967 | FSVATQTCQITPAEG | 137 | NON- |
| | NONGLYCO- | | | PVVTAQYDCLGCV | | GLYCO- |
| | SYLATED | | | HPISTQSPDLEPILR | | SYLATED |
| 926 | KNG1_205_541 | KNG1 | 967 | ITYSIVQTNCSK | 205 | 5412 |
| | 2 | | | | | |
| 927 | KNG1_294_541 | KNG1 | 967 | LNAENNATFYFK | 294 | 5412 |
| | 2 | | | | | |
| 928 | NEWQUANTPE | IGG3 | 540 | TPEVTCVVVDVSHE | N/A | N/A |
| | P- | | | DPEVQFK | | |
| | IGG3_TPEVTC | | | | | |
| | VVVDVSHEDP | | | | | |
| | EVQFK | | | | | |
| 929 | QUANTPEP.A1 | A1AT | 956 | AVLTIDEK | N/A | N/A |
| | AT_AVLTIDEK | | | | | |
| 930 | QUANTPEP.A2 | A2GL | 974 | DLLLPQPDLR | N/A | N/A |
| | GL_DLLLPQPD | | | | | |
| | LR | | | | | |
| 931 | QUANTPEP.AN | ANGT | 964 | SLDFTELDVAAEK | N/A | N/A |
| | GT_SLDFTELD | | | | | |
| | VAAEK | | | | | |
| 932 | QUANTPEP.B2 | B2M | 992 | VNHVTLSQPK | N/A | N/A |
| | M_VNHVTLSQ | | | | | |
| | PK | | | | | |
| 933 | QUANTPEP.IG | IGG4 | 970 | TTPPVLDSDGSFFLY | N/A | N/A |
| | G4_TTPPVLDS | | | SR | | |
| | DGSFFLYSR | | | | | |
| 934 | QUANTPEP.TR | TFRE | 977 | DDTVCLAK | N/A | N/A |
| | FE_DDTVCLA | | | | | |
| | K | | | | | |
| 935 | THBG_36_5402 | THBG | 984 | VTACHSSQPNATLY | 36 | 5402 |
| | THBG | | | K | | |
| 936 | THRB_416MC_ | THRB | 959 | WVLTAAHCLL YPP | 416 | 5402 |
| | 5402 | | | WDKNFTENDLL VR | | |
| 937 | TRFE_432_5401 | TRFE | 977 | CGLVPVLAENYNK | 432 | 5401 |
| 938 | TRFE_630_5401 | TRFE | 977 | QQQHLFGSNVTDCS | 630 | 5401 |
| | | | | GNFCLFR | | |
| 939 | TRFE_630_5411 | TRFE | 977 | QQQHLFGSNVTDCS | 630 | 5411 |
| | | | | GNFCLFR | | |
| 940 | TRFE_630_5412 | TRFE | 977 | QQQHLFGSNVTDCS | 630 | 5412 |
| | | | | GNFCLFR | | |
| 941 | TRFE_630_6513 | TRFE | 977 | QQQHLFGSNVTDCS | 630 | 6513 |
| | | | | GNFCLFR | | |
| 942 | VTNC_169_540 | VTNC | 980 | NGSLFAFR | 169 | 5401 |
| | 1 | | | | | |
| 943 | VTNC_86_6503 | VTNC | 980 | NNATVHEQVGGPSL | 86 | 6503 |
| | | | | TSDLQAQSK | | |
| 944 | PON1_324_650 | PON1 | 990 | VTQVYAENGTVLQ | 324 | 6501 |
| | 1 | | | GSTVASVYK | | |
| 945 | UN13A_1005_5 | UN13A | 995 | ACLNSTYEYIFNNC | 1005 | 5431 |
| | 431 | | | HEL YSR | | |
| 946 | CAN3_366_651 | CAN3 | 989 | NPWGQVEWNGSWS | 366 | 6513 |
| | 3 | | | DR | | |
| 947 | UN13A_1005_7 | UN13A | 995 | ACLNSTYEYIFNNC | 1005 | 7420 |
| | 420 | | | HELYSR | | |
| 948 | CAN3_366_650 | CAN3 | 989 | NPWGQVEWNGSWS | 366 | 6503 |
| | 3 | | | DR | | |
| 949 | AACT_106_760 | AACT | 963 | FNLTETSEAEIHQSF | 106 | 7604 |
| | 4 | | | QHLLR | | |
| 950 | A1AT_107_541 | A1AT | 956 | ADTHDEILEGLNFN | 107 | 5411 |
| | 1 | | | LTEIPEAQIHEGFQE | | |
| | | | | LLR | | |
| 951 | AGP1_33_5402 | AGP1 | 975 | QIPLCANLVPVPITN | 33 | 5402 |
| | | | | ATLDQITGK | | |
| 952 | FETUA_176_76 | FETUA | 976 | AALAAFNAQNNGS | 176 | 7600 |
| | 00 | | | NFQLEEISR | | |
| 953 | ITIH4_517_542 | ITIH5 | 994 | LPTQNITFQTESSVA | 517 | 5420.54 |
| | 0.5401 | | | EQEAEFQSPK | | 01 |
| 954 | PON1_324_650 | PON1 | 990 | VTQVYAENGTVLQ | 324 | 6502 |
| | 2 | | | GSTVASVYK | | |
| 955 | AGP1_33_6502 | AGP1 | 975 | QIPLCANL VPVPITN | 33 | 6502 |
| | | | | ATLDQITGK | | |

TABLE 71
Glycoproteins

| SEQ | Protein | | Uniprot |
|---|---|---|---|
| ID NO: | Abbreviation | Protein Name | ID |
| 956 | A1AT | Alpha-1-antitrypsin | P01009 |
| 957 | A2MG | Alpha-2-macroglobulin | P01023 |
| 958 | KLKB1 | Plasma Kallikrein | P03952 |
| 959 | THRB | Prothrombin | P00734 |
| 960 | CERU | Ceruloplasmin | P00450 |
| 961 | THRB | Prothrombin | P00734 |
| 962 | HPT | Haptoglobin | P00738 |
| 963 | AACT | Alpha-1-antichymotrypsin | P01011 |
| 964 | ANGT | Angiotensinogen | P01019 |
| 965 | A2MG | Alpha-2-macroglobulin | P01023 |
| 966 | CO5 | ComplementC5 | P01031 |
| 967 | KNG1 | Kininogen-1 | P01042 |
| 968 | IGJ | Immunoglobulin J chain | P01591 |
| 969 | IGG1 | Immunoglobulin heavy | P01857 |
| | | constant gamma 1 | |
| 970 | IGG4 | Immunoglobulin heavy | P01861 |
| | | constant gamma 4 | |
| 971 | IGM | Immunoglobulin heavy | P01871 |
| | | constant mu | |
| 972 | IGA2 | Immunoglobulin heavy | P01877 |
| | | constant alpha 2 | |
| 973 | APOC3 | Apolipoprotein C-III | P02656 |
| 974 | A2GL | Leucine-richAlpha-2- | P02750 |
| | | glycoprotein | |
| 975 | AGP1 | Alpha-1-acid glycoprotein 1 | P02763 |
| 976 | FETUA | Alpha-2-HS-glycoprotein | P02765 |
| 977 | TRFE | Serotransferrin | P02787 |
| 978 | HEMO | Hemopexin | P02790 |
| 979 | KLKB1 | Plasma Kallikrein | P03952 |
| 980 | VTNC | Vitronectin | P04004 |
| 981 | HRG | Histidine-rich Glycoprotein | P04196 |
| 982 | APOD | Apolipoprotein D | P05090 |
| 983 | IC1 | Plasma protease C1 inhibitor | P05155 |
| 984 | THBG | Thyroxine-bindingGlobulin | P05543 |
| 985 | CO2 | ComplementC2 | P06681 |
| 986 | CO8B | ComplementComponentC8BChain | P07358 |
| 987 | CFAH | ComplementFactorH | P08603 |
| 988 | CLUS | Clusterin | P10909 |
| 989 | CAN3 | Calpain-3 | P20807 |
| 990 | PON1 | Serum | P27169 |
| | | paraoxonase/arylesterase 1 | |
| 991 | AFAM | Afamin | P43652 |
| 992 | B2M | Beta-2-microglobulin | P61769 |
| 993 | FHR1 | Complement factor H-related | Q03591 |
| | | protein 1 | |
| 994 | ITIH4 | Inter-alpha-trypsin inhibitor | Q14624 |
| | | heavy chain H4 | |
| 995 | UN13A | Protein unc-13HomologA | Q9UPW8 |
| 996 | AGP2 | Alpha-1-acid glycoprotein 2 | P19652 |

TABLE 72
Protein abbreviation, glycosylation site, glycan
structure, precursor ion m/z, and product ion
m/z for transitions associated with melanoma

| Transition | | | | Precursor | Product |
|---|---|---|---|---|---|
| Number | Protein | Site | Structure | m/z | m/z |
| 673 | A2GL | N/A | N/A | 590.3 | 725.4 |
| 674 | ANGT | N/A | N/A | 719.4 | 316.2 |
| 675 | A1AT | 70 | 5412 | 1107.7 | 366.1 |
| 676 | HPT | 184 | 5412 | 1258.7 | 366.1 |
| 677 | HPT | 241 | 6513 | 1201.5 | 366.1 |
| 678 | HEMO | 187 | 5412 | 1253.2 | 366.1 |
| 679 | IC1 | 48 | 1102 | 883.4 | 274.1 |
| 680 | HPT | 184 | 6513 | 1138.4 | 366.1 |
| 681 | APOC3 | 74 | NONGLYCO- | 1069.2 | 1097.59 |
| | | | SYLATED | | |
| 682 | IGM | 209 | 5500 | 1042.4 | 366.1 |
| 683 | FETUA | 156 | 5412 | 1031.9 | 204.1 |
| 684 | B2M | N/A | N/A | 561.8 | 244.2 |
| 685 | IC1 | 253 | 5412 | 1114.2 | 204.1 |
| 686 | CERU | 138 | 5412 | 1062.2 | 366.1 |
| 687 | IGM | 209 | 5501 | 1115 | 366.1 |
| 688 | THRB | 416 | 5402 | 1076.5 | 274.1 |
| 689 | TRFE | 630 | 5412 | 1217.7 | 366.1 |
| 690 | FETUA | 176 | 6501 | 1161.7 | 366.1 |
| 691 | CO5 | 741 | 5412 | 1007.7 | 366.1 |
| 692 | FETUA | 176 | 5412 | 1180.2 | 366.1 |
| 693 | CFAH | 911 | 5401 | 1159.4 | 366.1 |
| 694 | IGG1 | 297 | 4511 | 1097.8 | 204.1 |
| 695 | A2MG | 247 | 5200 | 1239.1 | 1314.2 |
| 696 | CERU | 138 | 5402 | 1025.7 | 274.1 |
| 697 | IGA2 | 205 | 4510 | 923.5 | 366.1 |
| 698 | HRG | 125 | 5402 | 1056.2 | 366.1 |
| 699 | HPT | 207 | 121005 | 1378.9 | 366.1 |
| 700 | AACT | 106 | 7604 | 1184.9 | 274.1 |
| 701 | CERU | 397 | 6503 | 998.8 | 204.1 |
| 702 | HPT | 207 | 11904 | 1247.7 | 366.1 |

TABLE 73
Retention time, Δ retention time, and collision
energy for transitions associated with melanoma

| | Retention | Delta | |
|---|---|---|---|
| Transition | Time | Retention | Collision |
| Number | (min) | Time | Energy |
| 673 | 30.53 | 1.4 | 15 |
| 674 | 30.46 | 1.2 | 21 |
| 675 | 47.02 | 2 | 27 |
| 676 | 33.49 | 1.4 | 31 |
| 677 | 31.15 | 1.4 | 30 |
| 678 | 21.54 | 1.5 | 30 |
| 679 | 11.64 | 1.4 | 25 |
| 680 | 34.56 | 1.4 | 28 |
| 681 | 38.45 | N/A | N/A |
| 682 | 23.6 | 1.4 | 30 |
| 683 | 27.38 | 1.6 | 30 |
| 684 | 9.46 | 1.2 | 25 |
| 685 | 35.71 | 1.4 | 30 |
| 686 | 16.6 | 1.4 | 25 |
| 687 | 25.38 | 1.4 | 20 |
| 688 | 40.57 | 1.4 | 20 |
| 689 | 32.42 | 1.8 | 30 |
| 690 | 30.11 | 1.4 | 29 |
| 691 | 4.17 | 1.6 | 30 |
| 692 | 30.61 | 1.4 | 29 |
| 693 | 12.23 | 1.4 | 35 |
| 694 | 8.61 | 1.3 | 15 |
| 695 | 38.71 | 1.3 | 25 |
| 696 | 16.83 | 1.4 | 20 |
| 697 | 12.44 | 1.4 | 22 |
| 698 | 28.65 | 1.4 | 25 |
| 699 | 13.48 | 1.5 | 35 |
| 700 | 38.45 | 1.2 | 30 |
| 701 | 27.87 | 1.4 | 40 |
| 702 | 13.45 | 1.5 | 31 |

TABLE 74
Protein abbreviation, glycosylation site, glycan structure, precursor
ion m/z, and product ion m/z for transitions associated with NSCLC

| Transition | | | | Precursor | Product |
|---|---|---|---|---|---|
| Number | Protein | Site | Structure | m/z | m/z |
| 731 | TRFE | 630 | 6513 | 1105.6 | 366.1 |
| 732 | AGP1 | 93 | 6503 | 1195.3 | 366.1 |
| 733 | IGG2 | 297 | 5510 | 1043.8 | 366.1 |
| 734 | IGG1 | 297 | 5410 | 987.1 | 366.1 |
| 735 | AACT | 271 | 6502 | 1441.6 | 366.1 |
| 736 | AGP1 | 103 | 6503 | 1213.3 | 366.1 |
| 737 | IGG1 | 297 | 3410 | 879 | 204.1 |
| 738 | IGG1 | 297 | 5510 | 1054.7 | 366.1 |
| 739 | VTNC | 86 | 6503 | 1311.8 | 366.1 |
| 740 | HPT | 241 | 6513 | 1201.5 | 366.1 |
| 741 | CERU | 762 | 6523 | 1295 | 274.1 |
| 742 | HRG | 345 | 5412 | 994.4 | 366.1 |
| 743 | HPT | 207 | 5401 | 1124.8 | 366.1 |
| 744 | AGP1 | 93 | 8704 | 967.4 | 366.1 |
| 745 | HRG | 125 | 5402 | 1056.2 | 366.1 |
| 746 | A1AT | 271 | 5401 | 1224.5 | 366.1 |
| 747 | KNG1 | 205 | 5412 | 942.4 | 274.1 |
| 748 | TRFE | 432 | 5401 | 1131.1 | 366.1 |
| 749 | IGG2 | 297 | 5410 | 976.1 | 366.1 |
| 750 | TRFE | 630 | 5400 | 1035.6 | 366.1 |
| 751 | AGP1 | 93 | 7603 | 1286.6 | 366.1 |
| 752 | CERU | 762 | 6512 | 1186 | 366.1 |
| 753 | A1AT | 107 | 6502 | 1253.6 | 366.1 |
| 754 | KLKB1 | 494 | 5400 | 968.2 | 366.1 |
| 755 | IGG1 | 297 | 5411 | 1084.1 | 366.1 |
| 756 | HPT | 207 | 121005 | 1378.9 | 366.1 |
| 757 | FETUA | 176 | 5412 | 1180.2 | 366.1 |
| 758 | HPT | 241 | 5412 | 1383 | 366.1 |
| 759 | CFAH | 882 | 5401 | 984.7 | 366.1 |
| 760 | AGP1 | 93 | 6502 | 1122.5 | 366.1 |
| 761 | IC1 | 352 | 5412 | 1167.3 | 366.1 |
| 762 | HEMO | 187 | NONGLYCO- | 703.3 | 566.3 |
| | | | SYLATED | | |
| 763 | KLKB1 | 396 | 5401 | 1069.2 | 204.1 |
| 764 | IGJ | 71 | 5412 | 1193.8 | 366.1 |
| 765 | AGP12 | 72 | 7614 | 1313.1 | 366.1 |
| 766 | TRFE | 630 | 5401 | 1108.4 | 366.1 |
| 767 | TRFE | 630 | 5411 | 1144.9 | 366.1 |
| 768 | IGM | 209 | 5512 | 1224.1 | 366.1 |
| 769 | KNG1 | 137 | NONGLYCO- | 1190.6 | 1349.7 |
| | | | SYLATED | | |
| 770 | FHR1 | 126 | 5402 | 1265.5 | 366.1 |
| 771 | IGG1 | 297 | 4500 | 951.7 | 204.1 |
| 772 | AGP1 | 93 | 7612 | 1250.3 | 366.1 |
| 773 | A1AT | 271 | 5402 | 991.2 | 366.1 |
| 774 | A1AT | 271 | 6503 | 1155.5 | 274.1 |
| 775 | KNG1 | 294 | 5412 | 946.9 | 204.1 |
| 776 | CO2 | 621 | 6200 | 945.1 | 829.4 |
| 777 | HRG | 271 | 2202 | 710.8 | 274.1 |
| 778 | APOD | 98 | 5412 | 1152.5 | 274.1 |
| 779 | AFAM | 33 | 5402 | 851.1 | 366.1 |

TABLE 75
Retention time, Δ retention time, and collision
energy for transitions associated with NSCLC

| | Retention | Delta | |
|---|---|---|---|
| Transition | Time | Retention | Collision |
| Number | (min) | Time | Energy |
| 731 | 33.44 | 1.4 | 27 |
| 732 | 23.77 | 1.4 | 25 |
| 733 | 12.99 | 1.2 | 25 |
| 734 | 7.9 | 1.3 | 24 |
| 735 | 30.91 | 1.4 | 35 |
| 736 | 5.97 | 1.6 | 30 |
| 737 | 8.01 | 1.3 | 21 |
| 738 | 8.09 | 1.3 | 20 |
| 739 | 19.44 | 1.4 | 37 |
| 740 | 31.27 | 1.4 | 30 |
| 741 | 20.77 | 1.4 | 25 |
| 742 | 6.55 | 1.4 | 25 |
| 743 | 14.38 | 1.5 | 30 |
| 744 | 23.81 | 1.4 | 23 |
| 745 | 28.7 | 1.4 | 25 |
| 746 | 37.62 | 1.4 | 30 |
| 747 | 16.93 | 1.4 | 20 |
| 748 | 26.42 | 1.4 | 28 |
| 749 | 12.87 | 1.2 | 20 |
| 750 | 30.62 | 1.4 | 25 |
| 751 | 23.61 | 1.4 | 25 |
| 752 | 19.97 | 1.4 | 36 |
| 753 | 42.79 | 1.6 | 30 |
| 754 | 30.4 | 1.4 | 30 |
| 755 | 8.35 | 1.3 | 27 |
| 756 | 13.41 | 1.5 | 35 |
| 757 | 30.64 | 1.4 | 29 |
| 758 | 30.52 | 1.4 | 35 |
| 759 | 14.9 | 1.6 | 25 |
| 760 | 23.17 | 1.4 | 28 |
| 761 | 39.45 | 1.5 | 30 |
| 762 | 21.83 | 1.4 | 20 |
| 763 | 39.8 | 1.4 | 25 |
| 764 | 16.04 | 1.4 | 25 |
| 765 | 41.23 | 1.4 | 27 |
| 766 | 31.54 | 1.8 | 27 |
| 767 | 30.97 | 1.6 | 30 |
| 768 | 26.21 | 1.4 | 30 |
| 769 | 38.59 | 1 | 30 |
| 770 | 11.55 | 1.5 | 30 |
| 771 | 8.13 | 1.3 | 23 |
| 772 | 22.84 | 1.4 | 31 |
| 773 | 38.43 | 1.4 | 24 |
| 774 | 38.74 | 1.4 | 30 |
| 775 | 22.96 | 1.4 | 20 |
| 776 | 16.26 | 1.4 | 25 |
| 777 | 6.74 | 1.4 | 15 |
| 778 | 24.42 | 1.4 | 30 |
| 779 | 11.62 | 1.2 | 20 |

TABLE 76
Glycan Structures

| Glycan | | |
|---|---|---|
| Structure | | |
| GL NO. | Structure | Composition |
| 1102 | [symbol] | Hex(1)HexNAc(1)Fuc(0)NeuAc(2) |
| 2202 | [symbol] | Hex(2)HexNAc(2)Fuc(0)NeuAc(2) |
| 3410 | [symbol] | Hex(3)HexNAc(4)Fuc(1)NeuAc(0) |
| 3500 | [symbol] | Hex(3)HexNAc(5)Fuc(0)NeuAc(0) |
| 4400 | [symbol] | Hex(4)HexNAc(4)Fuc(0)NeuAc(0) |
| 4401 | [symbol] | Hex(4)HexNAc(4)Fuc(0)NeuAc(1) |
| 4410 | [symbol] | Hex(4)HexNAc(4)Fuc(1)NeuAc(0) |
| 4411 | [symbol] | Hex(4)HexNAc(4)Fuc(1)NeuAc(1) |
| 4500 | [symbol] | Hex(4)HexNAc(5)Fuc(0)NeuAc(0) |
| 4510 | [symbol] | Hex(4)HexNAc(5)Fuc(1)NeuAc(0) |
| 4511 | [symbol] | Hex(4)HexNAc(5)Fuc(1)NeuAc(1) |
| 5200 | [symbol] | Hex(5)HexNAc(2)Fuc(0)NeuAc(0) |
| 5400 | [symbol] | Hex(5)HexNAc(4)Fuc(0)NeuAc(0) |
| 5401 | [symbol] | Hex(5)HexNAc(4)Fuc(0)NeuAc(1) |
| 5402 | [symbol] | Hex(5)HexNAc(4)Fuc(0)NeuAc(2) |
| 5410 | [symbol] | Hex(5)HexNAc(4)Fuc(1)NeuAc(0) |
| 5411 | [symbol] | Hex(5)HexNAc(4)Fuc(1)NeuAc(1) |
| 5412 | [symbol] | Hex(5)HexNAc(4)Fuc(1)NeuAc(2) |
| 5420 | [symbol] | Hex(5)HexNAc(4)Fuc(2)NeuAc(0) |
| 5421 | [symbol] | Hex(5)HexNAc(4)Fuc(2)NeuAc(1) |
| 5431 | [symbol] | Hex(5)HexNAc(4)Fuc(3)NeuAc(1) |
| 5500 | [symbol] | Hex(5)HexNAc(5)Fuc(0)NeuAc(0) |
| 5501 | [symbol] | Hex(5)HexNAc(5)Fuc(0)NeuAc(1) |
| 5502 | [symbol] | Hex(5)HexNAc(5)Fuc(0)NeuAc(2) |
| 5510 | [symbol] | Hex(5)HexNAc(5)Fuc(1)NeuAc(0) |
| 5511 | [symbol] | Hex(5)HexNAc(5)Fuc(1)NeuAc(1) |
| 5512 | [symbol] | Hex(5)HexNAc(5)Fuc(1)NeuAc(2) |
| 6200 | [symbol] | Hex(6)HexNAc(2)Fuc(0)NeuAc(0) |
| 6501 | [symbol] | Hex(6)HexNAc(5)Fuc(0)NeuAc(1) |
| 6502 | [symbol] | Hex(6)HexNAc(5)Fuc(0)NeuAc(2) |
| 6503 | [symbol] | Hex(6)HexNAc(5)Fuc(0)NeuAc(3) |
| 6512 | [symbol] | Hex(6)HexNAc(5)Fuc(1)NeuAc(2) |
| 6513 | [symbol] | Hex(6)HexNAc(5)Fuc(1)NeuAc(3) |
| 6520 | [symbol] | Hex(6)HexNAc(5)Fuc(2)NeuAc(0) |
| 6523 | [symbol] | Hex(6)HexNAc(5)Fuc(2)NeuAc(3) |
| 6610 | [symbol] | Hex(6)HexNAc(6)Fuc(1)NeuAc(0) |
| 7420 | [symbol] | Hex(7)HexNAc(4)Fuc(2)NeuAc(0) |
| 7512 | [symbol] | Hex(7)HexNAc(5)Fuc(1)NeuAc(2) |
| 7600 | [symbol] | Hex(7)HexNAc(6)Fuc(0)NeuAc(0) |
| 7602 | [symbol] | Hex(7)HexNAc(6)Fuc(0)NeuAc(2) |
| 7603 | [symbol] | Hex(7)HexNAc(6)Fuc(0)NeuAc(3) |
| 7604 | [symbol] | Hex(7)HexNAc(6)Fuc(0)NeuAc(4) |
| 7612 | [symbol] | Hex(7)HexNAc(6)Fuc(1)NeuAc(2) |
| 7614 | [symbol] | Hex(7)HexNAc(6)Fuc(1)NeuAc(4) |
| 8704 | [symbol] | Hex(8)HexNAc(7)Fuc(0)NeuAc(4) |
| 10803 (5401 & 5402) (two glycans on the same peptide) | [symbol] | 5401: Hex(5)HexNAc(4)Fuc(0)NeuAc(1) and 5402: Hex(5)HexNAc(4)Fuc(0)NeuAc(2) |
| 11904 (5402 and 6502) | [symbol] | 5402: Hex(5)HexNAc(4)Fuc(0)NeuAc(2) 6502: Hex(6)HexNAc(5)Fuc(0)NeuAc(2) |
| 121005 (6502) | [symbol] | 6502: Hex(6)HexNAc(5)Fuc(0)NeuAc(2) |
| 121005 (6503) | [symbol] | 6503: Hex(6)HexNAc(5)Fuc(0)NeuAc(3) |

Legend for Table 76
▪ Glc [symbol]
Gal [symbol]
Man [symbol]
Fuc [symbol]
Neu5Ac
● GlcNAc [symbol]
GalNAc [symbol]
ManNAc

[1283] In some embodiments, provided herein are methods for diagnosing a melanoma condition (metastatic melanoma) comprising detecting one or more biomarkers. In some embodiments, the one or more biomarkers comprise one or more glycopeptides. In some embodiments, the one or more biomarkers comprises one or more peptide structures set forth in Table 61. In some embodiments, the method comprises detecting one or more glycopeptides comprising a sequence set forth in SEQ ID NOS: 570-595. In some embodiments, the method comprises detecting one or more glycopeptides comprising a sequence set forth in SEQ ID NOS: 570-595. In some embodiments, the method comprises detecting one or more glycopeptides comprising a sequence set forth in SEQ ID NOS: 570-595. In some embodiments, the method comprises detecting one or more glycopeptides comprising a sequence set forth in SEQ ID NOS: 570-595. In some embodiments, the glycopeptide comprises a glycan with the structures in Table 61. In some embodiments, the glycopeptide is a glycopeptide of a glycoprotein provided in Table 62A. In some embodiments, the glycopeptide is a glycopeptide provided in Table 70. In some embodiments the glycopeptide comprises a sequence set forth in SEQ ID NO:826-955. In some embodiments, the glycopeptide is a glycopeptide a glycoprotein comprising SEQ ID NO:550-569.

[1284] In some embodiments, the diagnosis is based upon presence and/or amount of at least one, at least two, at least three, at least four, at least five, at least six, at least seven or eight peptide structures from Table 61. In some embodiments, the diagnosis is based upon the presence and/or amount of one or more peptides comprising the amino acid sequence of SEQ ID NOS: 570-595. In some embodiments, the diagnosis is based upon the presence and/or amount of two or more peptides comprising the amino acid sequence of SEQ ID NOS: 570-595. In some embodiments, the diagnosis is based upon the presence and/or amount of three or more peptides comprising the amino acid sequence of SEQ ID NOS: 570-595. In some embodiments, the diagnosis is based upon the presence and/or amount of four or more peptides comprising the amino acid sequence of SEQ ID NOS: 570-595. In some embodiments, the diagnosis is based upon the presence and/or amount of five or more peptides comprising the amino acid sequence of SEQ ID NOS: 570-595. In some embodiments, the diagnosis is based upon the presence and/or amount of six or more peptides comprising the amino acid sequence of SEQ ID NOS: 570-595. In some embodiments, the diagnosis is based upon the presence and/or amount of seven or more peptides comprising the amino acid sequence of SEQ ID NOS: 570-595. In some embodiments, the diagnosis is based upon the presence and/or amount of each of the peptides comprising the amino acid sequence of SEQ ID NOS: 570-595. In some embodiments, the glycopeptide is a glycopeptide of a glycoprotein provided in Table 62A. In some embodiments, the glycopeptide is a glycopeptide provided in Table 70. In some embodiments the glycopeptide comprises a sequence set forth in SEQ ID NO: 826-955. In some embodiments, the glycopeptide is a glycopeptide a glycoprotein comprising SEQ ID NO: 550-569.

[1285] In some embodiments, the diagnosis is based upon the presence and/or amount of one or more peptides consisting of the amino acid sequence of SEQ ID NOS: 570-595. In some embodiments, the diagnosis is based upon the presence and/or amount of two or more peptides consisting of the amino acid sequence of SEQ ID NOS: 570-595. In some embodiments, the diagnosis is based upon the presence and/or amount of three or more peptides consisting of the amino acid sequence of SEQ ID NOS: 570-595. In some embodiments, the diagnosis is based upon the presence and/or amount of four or more peptides consisting of the amino acid sequence of SEQ ID NOS: 570-595. In some embodiments, the diagnosis is based upon the presence and/or amount of five or more peptides consisting of the amino acid sequence of SEQ ID NOS: 570-595. In some embodiments, the diagnosis is based upon the presence and/or amount of six or more peptides consisting of the amino acid sequence of SEQ ID NOS: 570-595. In some embodiments, the diagnosis is based upon the presence and/or amount of seven or more peptides consisting of the amino acid sequence of SEQ ID NOS: 570-595. In some embodiments, the diagnosis is based upon the presence and/or amount of each of the peptides consisting of the amino acid sequence of SEQ ID NOS: 570-595. In some embodiments, the glycopeptide is a glycopeptide of a glycoprotein provided in Table 62A. In some embodiments, the glycopeptide is a glycopeptide provided in Table 70. In some embodiments the glycopeptide comprises a sequence set forth in SEQ ID NO: 826-955. In some embodiments, the glycopeptide is a glycopeptide a glycoprotein comprising SEQ ID NO: 550-569.

[1286] In some embodiments, the diagnosis is based upon the presence and/or amount of one or more peptides comprising the amino acid sequence of SEQ ID NOS: 570-595. In some embodiments, the diagnosis is based upon the presence and/or amount of two or more peptides comprising the amino acid sequence of SEQ ID NOS: 570-595. In some embodiments, the diagnosis is based upon the presence and/or amount of three or more peptides comprising the amino acid sequence of SEQ ID NOS: 570-595. In some embodiments, the diagnosis is based upon the presence and/or amount of four or more peptides comprising the amino acid sequence of SEQ ID NOS: 570-595. In some embodiments, the diagnosis is based upon the presence and/or amount of five or more peptides comprising the amino acid sequence of SEQ ID NOS: 570-595. In some embodiments, the diagnosis is based upon the presence and/or amount of six or more peptides comprising the amino acid sequence of SEQ ID NOS: 570-595. In some embodiments, the diagnosis is based upon the presence and/or amount of seven or more peptides comprising the amino acid sequence of SEQ ID NOS: 570-595. In some embodiments, the diagnosis is based upon the presence and/or amount of each of the peptides comprising the amino acid sequence of SEQ ID NOS: 570-595. In some embodiments, the glycopeptide is a glycopeptide of a glycoprotein provided in Table 62A. In some embodiments, the glycopeptide is a glycopeptide provided in Table 70. In some embodiments the glycopeptide comprises a sequence set forth in SEQ ID NO: 826-955. In some embodiments, the glycopeptide is a glycopeptide a glycoprotein comprising SEQ ID NO: 550-569.

[1287] In some embodiments, the diagnosis is based upon the presence and/or amount of one or more peptides consisting of the amino acid sequence of SEQ ID NOS: 570-595. In some embodiments, the diagnosis is based upon the presence and/or amount of two or more peptides consisting of the amino acid sequence of SEQ ID NOS: 570-595. In some embodiments, the diagnosis is based upon the presence and/or amount of three or more peptides consisting of the amino acid sequence of SEQ ID NOS: 570-595. In some embodiments, the diagnosis is based upon the presence and/or amount of four or more peptides consisting of the amino acid sequence of SEQ ID NOS: 570-595. In some embodiments, the diagnosis is based upon the presence and/or amount of five or more peptides consisting of the amino acid sequence of SEQ ID NOS: 570-595. In some embodiments, the diagnosis is based upon the presence and/or amount of six or more peptides consisting of the amino acid sequence of SEQ ID NOS: 570-595. In some embodiments, the diagnosis is based upon the presence and/or amount of seven or more peptides consisting of the amino acid sequence of SEQ ID NOS: 570-595. In some embodiments, the diagnosis is based upon the presence and/or amount of each of the peptides consisting of the amino acid sequence of SEQ ID NOS: 570-595. In some embodiments, the glycopeptide is a glycopeptide of a glycoprotein provided in Table 62A. In some embodiments, the glycopeptide is a glycopeptide provided in Table 70. In some embodiments the glycopeptide comprises a sequence set forth in SEQ ID NO: 826-955. In some embodiments, the glycopeptide is a glycopeptide a glycoprotein comprising SEQ ID NO: 550-569.

[1288] In some embodiments, provided herein is a method of treating a melanoma condition (metastatic melanoma) in an individual based upon the presence, absence, or amount of one or more peptide structures set forth in Table 61. In some embodiments, one or more peptide structures set forth in SEQ ID NOS: 570-595 is detected. In some embodiments, the method further comprises delivering a therapeutic agent based upon the presence, absence, or amount of one or more peptide structures set forth in Table 61. In some embodiments, the method comprises selecting a therapeutic agent based upon the presence, absence, or amount of one or more peptide structures set forth in Table 61. In some embodiments, the therapeutic agent is a chemotherapeutic agent and/or a hormone therapy.

[1289] In some embodiments, provided herein are methods for diagnosing a melanoma condition (metastatic melanoma) comprising detecting one or more biomarkers. In some embodiments, the one or more biomarkers comprise one or more glycopeptides. In some embodiments, the one or more biomarkers comprises one or more peptide structures set forth in Table 66. In some embodiments, the method comprises detecting one or more glycopeptides comprising a sequence set forth in SEQ ID NOs: 673-703. In some embodiments, the method comprises detecting one or more glycopeptides comprising a sequence set forth in SEQ ID NOs: 673-703. In some embodiments, the method comprises detecting one or more glycopeptides comprising a sequence set forth in SEQ ID NOs: 673-703. In some embodiments, the method comprises detecting one or more glycopeptides comprising a sequence set forth in SEQ ID NOs: 673-703. In some embodiments, the glycopeptide comprises a glycan with the structures in Table 66. In some embodiments the glycopeptide is a glycopeptide of a glycoprotein provided in Table 67. In some embodiments, the glycopeptide is a glycopeptide of a glycoprotein provided in SEQ ID NO: 704-730.

[1290] In some embodiments, the diagnosis is based upon presence and/or amount of at least one, at least two, at least three, at least four, at least five, at least six, at least seven or eight peptide structures from Table 66. In some embodiments, the diagnosis is based upon the presence and/or amount of one or more peptides comprising the amino acid sequence of SEQ ID NOs: 673-708. In some embodiments, the diagnosis is based upon the presence and/or amount of two or more peptides comprising the amino acid sequence of SEQ ID NOs: 673-708. In some embodiments, the diagnosis is based upon the presence and/or amount of three or more peptides comprising the amino acid sequence of SEQ ID NOs: 673-708. In some embodiments, the diagnosis is based upon the presence and/or amount of four or more peptides comprising the amino acid sequence of SEQ ID NOs: 673-708. In some embodiments, the diagnosis is based upon the presence and/or amount of five or more peptides comprising the amino acid sequence of SEQ ID NOs: 673-708. In some embodiments, the diagnosis is based upon the presence and/or amount of six or more peptides comprising the amino acid sequence of SEQ ID NOs: 673-708. In some embodiments, the diagnosis is based upon the presence and/or amount of seven or more peptides comprising the amino acid sequence of SEQ ID NOs: 673-708. In some embodiments, the diagnosis is based upon the presence and/or amount of each of the peptides comprising the amino acid sequence of SEQ ID NOs: 673-708. In some embodiments the glycopeptide is a glycopeptide of a glycoprotein provided in Table 67. In some embodiments, the glycopeptide is a glycopeptide of a glycoprotein provided in SEQ ID NO: 704-730.

[1291] In some embodiments, the diagnosis is based upon the presence and/or amount of one or more peptides consisting of the amino acid sequence of SEQ ID NOs: 673-708. In some embodiments, the diagnosis is based upon the presence and/or amount of two or more peptides consisting of the amino acid sequence of SEQ ID NOs: 673-708. In some embodiments, the diagnosis is based upon the presence and/or amount of three or more peptides consisting of the amino acid sequence of SEQ ID NOs: 673-708. In some embodiments, the diagnosis is based upon the presence and/or amount of four or more peptides consisting of the amino acid sequence of SEQ ID NOs: 673-708. In some embodiments, the diagnosis is based upon the presence and/or amount of five or more peptides consisting of the amino acid sequence of SEQ ID NOs: 673-708. In some embodiments, the diagnosis is based upon the presence and/or amount of six or more peptides consisting of the amino acid sequence of SEQ ID NOs: 673-708. In some embodiments, the diagnosis is based upon the presence and/or amount of seven or more peptides consisting of the amino acid sequence of SEQ ID NOs: 673-708. In some embodiments, the diagnosis is based upon the presence and/or amount of each of the peptides consisting of the amino acid sequence of SEQ ID NOs: 673-708. In some embodiments the glycopeptide is a glycopeptide of a glycoprotein provided in Table 67. In some embodiments, the glycopeptide is a glycopeptide of a glycoprotein provided in SEQ ID NO: 704-730.

[1292] In some embodiments, the diagnosis is based upon the presence and/or amount of one or more peptides comprising the amino acid sequence of SEQ ID NOs: 673-708. In some embodiments, the diagnosis is based upon the presence and/or amount of two or more peptides comprising the amino acid sequence of SEQ ID NOs: 673-708. In some embodiments, the diagnosis is based upon the presence and/or amount of three or more peptides comprising the amino acid sequence of SEQ ID NOs: 673-708. In some embodiments, the diagnosis is based upon the presence and/or amount of four or more peptides comprising the amino acid sequence of SEQ ID NOs: 673-708. In some embodiments, the diagnosis is based upon the presence and/or amount of five or more peptides comprising the amino acid sequence of SEQ ID NOs: 673-708. In some embodiments, the diagnosis is based upon the presence and/or amount of six or more peptides comprising the amino acid sequence of SEQ ID NOs: 673-708. In some embodiments, the diagnosis is based upon the presence and/or amount of seven or more peptides comprising the amino acid sequence of SEQ ID NOs: 673-708. In some embodiments, the diagnosis is based upon the presence and/or amount of each of the peptides comprising the amino acid sequence of SEQ ID NOs: 673-708. In some embodiments the glycopeptide is a glycopeptide of a glycoprotein provided in Table 67. In some embodiments, the glycopeptide is a glycopeptide of a glycoprotein provided in SEQ ID NO: 704-730.

[1293] In some embodiments, the diagnosis is based upon the presence and/or amount of one or more peptides consisting of the amino acid sequence of SEQ ID NOs: 673-708. In some embodiments, the diagnosis is based upon the presence and/or amount of two or more peptides consisting of the amino acid sequence of SEQ ID NOs: 673-708. In some embodiments, the diagnosis is based upon the presence and/or amount of three or more peptides consisting of the amino acid sequence of SEQ ID NOs: 673-708. In some embodiments, the diagnosis is based upon the presence and/or amount of four or more peptides consisting of the amino acid sequence of SEQ ID NOs: 673-708. In some embodiments, the diagnosis is based upon the presence and/or amount of five or more peptides consisting of the amino acid sequence of SEQ ID NOs: 673-708. In some embodiments, the diagnosis is based upon the presence and/or amount of six or more peptides consisting of the amino acid sequence of SEQ ID NOs: 673-708. In some embodiments, the diagnosis is based upon the presence and/or amount of seven or more peptides consisting of the amino acid sequence of SEQ ID NOs: 673-708. In some embodiments, the diagnosis is based upon the presence and/or amount of each of the peptides consisting of the amino acid sequence of SEQ ID NOs: 673-708. In some embodiments the glycopeptide is a glycopeptide of a glycoprotein provided in Table 67. In some embodiments, the glycopeptide is a glycopeptide of a glycoprotein provided in SEQ ID NO: 704-730.

[1294] In some embodiments, provided herein is a method of treating a melanoma condition (metastatic melanoma) in an individual based upon the presence, absence, or amount of one or more peptide structures set forth in Table 66. In some embodiments, one or more peptide structures set forth in SEQ ID NOs: 673-708 is detected. In some embodiments, the method further comprises delivering a therapeutic agent based upon the presence, absence, or amount of one or more peptide structures set forth in Table 66. In some embodiments, the method comprises selecting a therapeutic agent based upon the presence, absence, or amount of one or more peptide structures set forth in Table 66. In some embodiments, the therapeutic agent is a chemotherapeutic agent and/or a hormone therapy. In some embodiments the glycopeptide is a glycopeptide of a glycoprotein provided in Table 67. In some embodiments, the glycopeptide is a glycopeptide of a glycoprotein provided in SEQ ID NO: 704-730.

[1295] In some embodiments, provided herein are methods for diagnosing non-small-cell lung cancer (NSCLC) comprising detecting one or more biomarkers. In some embodiments, the one or more biomarkers comprise one or more glycopeptides. In some embodiments, the one or more biomarkers comprises one or more peptide structures set forth in Table 68. In some embodiments, the method comprises detecting one or more glycopeptides comprising a sequence set forth in SEQ ID NOs: 731-779. In some embodiments, the method comprises detecting one or more glycopeptides comprising a sequence set forth in SEQ ID NOs: 731-779. In some embodiments, the method comprises detecting one or more glycopeptides comprising a sequence set forth in SEQ ID NOs: 731-779. In some embodiments, the method comprises detecting one or more glycopeptides comprising a sequence set forth in SEQ ID NOs: 731-779. In some embodiments, the glycopeptide comprises a glycan with the structures in Table 68. In some embodiments, the glycopeptide is a glycopeptide of a glycoprotein provided in Table 69. In some embodiments, the glycopeptide is a glycopeptide of a glycoprotein comprising a sequence set forth in SEQ ID NO: 780-825.

[1296] In some embodiments, the diagnosis is based upon presence and/or amount of at least one, at least two, at least three, at least four, at least five, at least six, at least seven or eight peptide structures from Table 68. In some embodiments, the diagnosis is based upon the presence and/or amount of one or more peptides comprising the amino acid sequence of SEQ ID NOs: 731-779. In some embodiments, the diagnosis is based upon the presence and/or amount of two or more peptides comprising the amino acid sequence of SEQ ID NOs: 731-779. In some embodiments, the diagnosis is based upon the presence and/or amount of three or more peptides comprising the amino acid sequence of SEQ ID NOs: 731-779. In some embodiments, the diagnosis is based upon the presence and/or amount of four or more peptides comprising the amino acid sequence of SEQ ID NOs: 731-779. In some embodiments, the diagnosis is based upon the presence and/or amount of five or more peptides comprising the amino acid sequence of SEQ ID NOs: 731-779. In some embodiments, the diagnosis is based upon the presence and/or amount of six or more peptides comprising the amino acid sequence of SEQ ID NOs: 731-779. In some embodiments, the diagnosis is based upon the presence and/or amount of seven or more peptides comprising the amino acid sequence of SEQ ID NOs: 731-779. In some embodiments, the diagnosis is based upon the presence and/or amount of each of the peptides comprising the amino acid sequence of SEQ ID NOs: 731-779. In some embodiments, the glycopeptide is a glycopeptide of a glycoprotein provided in Table 69. In some embodiments, the glycopeptide is a glycopeptide of a glycoprotein comprising a sequence set forth in SEQ ID NO: 780-825.

[1297] In some embodiments, the diagnosis is based upon the presence and/or amount of one or more peptides consisting of the amino acid sequence of SEQ ID NOs: 731-779. In some embodiments, the diagnosis is based upon the presence and/or amount of two or more peptides consisting of the amino acid sequence of SEQ ID NOs: 731-779. In some embodiments, the diagnosis is based upon the presence and/or amount of three or more peptides consisting of the amino acid sequence of SEQ ID NOs: 731-779. In some embodiments, the diagnosis is based upon the presence and/or amount of four or more peptides consisting of the amino acid sequence of SEQ ID NOS: 570-595. In some embodiments, the diagnosis is based upon the presence and/or amount of five or more peptides consisting of the amino acid sequence of SEQ ID NOs: 731-779. In some embodiments, the diagnosis is based upon the presence and/or amount of six or more peptides consisting of the amino acid sequence of SEQ ID NOs: 731-779. In some embodiments, the diagnosis is based upon the presence and/or amount of seven or more peptides consisting of the amino acid sequence of SEQ ID NOs: 731-779. In some embodiments, the diagnosis is based upon the presence and/or amount of each of the peptides consisting of the amino acid sequence of SEQ ID NOs: 731-779. In some embodiments, the glycopeptide is a glycopeptide of a glycoprotein provided in Table 69. In some embodiments, the glycopeptide is a glycopeptide of a glycoprotein comprising a sequence set forth in SEQ ID NO: 780-825.

[1298] In some embodiments, the diagnosis is based upon the presence and/or amount of one or more peptides comprising the amino acid sequence of SEQ ID NOs: 731-779. In some embodiments, the diagnosis is based upon the presence and/or amount of two or more peptides comprising the amino acid sequence of SEQ ID NOs: 731-779. In some embodiments, the diagnosis is based upon the presence and/or amount of three or more peptides comprising the amino acid sequence of SEQ ID NOs: 731-779. In some embodiments, the diagnosis is based upon the presence and/or amount of four or more peptides comprising the amino acid sequence of SEQ ID NOs: 731-779. In some embodiments, the diagnosis is based upon the presence and/or amount of five or more peptides comprising the amino acid sequence of SEQ ID NOs: 731-779. In some embodiments, the diagnosis is based upon the presence and/or amount of six or more peptides comprising the amino acid sequence of SEQ ID NOs: 731-779. In some embodiments, the diagnosis is based upon the presence and/or amount of seven or more peptides comprising the amino acid sequence of SEQ ID NOs: 731-779. In some embodiments, the diagnosis is based upon the presence and/or amount of each of the peptides comprising the amino acid sequence of SEQ ID NOs: 731-779. In some embodiments, the glycopeptide is a glycopeptide of a glycoprotein provided in Table 69. In some embodiments, the glycopeptide is a glycopeptide of a glycoprotein comprising a sequence set forth in SEQ ID NO: 780-825.

[1299] In some embodiments, the diagnosis is based upon the presence and/or amount of one or more peptides consisting of the amino acid sequence of SEQ ID NOs: 731-779. In some embodiments, the diagnosis is based upon the presence and/or amount of two or more peptides consisting of the amino acid sequence of SEQ ID NOs: 731-779. In some embodiments, the diagnosis is based upon the presence and/or amount of three or more peptides consisting of the amino acid sequence of SEQ ID NOs: 731-779. In some embodiments, the diagnosis is based upon the presence and/or amount of four or more peptides consisting of the amino acid sequence of SEQ ID NOs: 731-779. In some embodiments, the diagnosis is based upon the presence and/or amount of five or more peptides consisting of the amino acid sequence of SEQ ID NOs: 731-779. In some embodiments, the diagnosis is based upon the presence and/or amount of six or more peptides consisting of the amino acid sequence of SEQ ID NOs: 731-779. In some embodiments, the diagnosis is based upon the presence and/or amount of seven or more peptides consisting of the amino acid sequence of SEQ ID NOs: 731-779. In some embodiments, the diagnosis is based upon the presence and/or amount of each of the peptides consisting of the amino acid sequence of SEQ ID NOs: 731-779. In some embodiments, the glycopeptide is a glycopeptide of a glycoprotein provided in Table 69. In some embodiments, the glycopeptide is a glycopeptide of a glycoprotein comprising a sequence set forth in SEQ ID NO: 780-825.

[1300] In some embodiments, provided herein is a method of treating non-small-cell lung cancer (NSCLC) in an individual based upon the presence, absence, or amount of one or more peptide structures set forth in Table 68. In some embodiments, one or more peptide structures set forth in SEQ ID NOs: 731-779 is detected. In some embodiments, the method further comprises delivering a therapeutic agent based upon the presence, absence, or amount of one or more peptide structures set forth in Table 68. In some embodiments, the method comprises selecting a therapeutic agent based upon the presence, absence, or amount of one or more peptide structures set forth in Table 68. In some embodiments, the therapeutic agent is a chemotherapeutic agent and/or a hormone therapy. In some embodiments, the glycopeptide is a glycopeptide of a glycoprotein provided in Table 69. In some embodiments, the glycopeptide is a glycopeptide of a glycoprotein comprising a sequence set forth in SEQ ID NO: 780-825.

[1301] In the descriptions herein, it is understood that every description, variation, embodiment or aspect of a biomarker, peptide, glycopeptide, glycoprotein may be combined with every description, variation, embodiment or aspect of other biomarkers, peptides, glycopeptide, glycoproteins the same as if each and every combination of descriptions is specifically and individually listed.

### II. Biomarkers for Determining Subject with NSCLC would Likely Benefit from Therapy

[1302] Provided herein are glycopeptide biomarkers. These biomarkers are useful for a variety of applications, including determining whether a subject is likely to benefit from pembrolizumab therapy. In some embodiments, the subject has NSCLC.. In some embodiments, the biomarkers are useful for classifying a patient so that the patient receives the appropriate medical treatment. In some embodiments, the biomarkers are useful for treating or ameliorating a disease or condition in patient by, for example, identifying a therapeutic agent with which to treat a patient.

### PROTEINS AND GLYCOPEPTIDES

TABLE 77
Glycoproteins associated with NSCLC

| SEQ ID | Protein | | Uniprot | |
|---|---|---|---|---|
| NO. | Abbreviation | Protein Name | ID | Protein Sequence |
| 997 | A1AT | Alpha-1- | P01009 | MPSSVSWGILLLAGLCC |
| | | antitrypsin | | LVPVSLAEDPQGDAAQ |
| | | | | KTDTSHHDQDHPTFNKI |
| | | | | TPNLAEFAFSLYRQLAH |
| | | | | QSNSTNIFFSPVSIATAF |
| | | | | AMLSLGTKADTHDEILE |
| | | | | GLNFNLTEIPEAQIHEGF |
| | | | | QELLRTLNQPDSQLQLT |
| | | | | TGNGLFLSEGLKLVDKF |
| | | | | LEDVKKLYHSEAFTVNF |
| | | | | GDTEEAKKQINDYVEK |
| | | | | GTQGKIVDLVKELDRDT |
| | | | | VFALVNYIFFKGKWERP |
| | | | | FEVKDTEEEDFHVDQVT |
| | | | | TVKVPMMKRLGMFNIQ |
| | | | | HCKKLSSWVLLMKYLG |
| | | | | NATAIFFLPDEGKLQHL |
| | | | | ENELTHDIITKFLENEDR |
| | | | | RSASLHLPKLSITGTYDL |
| | | | | KSVLGQLGITKVFSNGA |
| | | | | DLSGVTEEAPLKLSKAV |
| | | | | HKAVLTIDEKGTEAAG |
| | | | | AMFLEAIPMSIPPEVKFN |
| | | | | KPFVFLMIEQNTKSPLF |
| | | | | MGKVVNPTQK |
| 998 | AGP1 | Alpha-1-acid | P02763 | MALSWVLTVLSLLPLLE |
| | | glycoprotein 1 | | AQIPLCANLVPVPITNAT |
| | | | | LDQITGKWFYIASAFRN |
| | | | | EEYNKSVQEIQATFFYF |
| | | | | TPNKTEDTIFLREYQTR |
| | | | | QDQCIYNTTYLNVQRE |
| | | | | NGTISRYVGGQEHFAHL |
| | | | | LILRDTKTYMLAFDVND |
| | | | | EKNWGLSVYADKPETT |
| | | | | KEQLGEFYEALDCLRIP |
| | | | | KSDVVYTDWKKDKCEP |
| | | | | LEKQHEKERKQEEGES |
| 999 | AGP2 | Alpha-1-acid | P19652 | MALSWVLTVLSLLPLLE |
| | | glycoprotein 2 | | AQIPLCANLVPVPITNAT |
| | | | | LDRITGKWFYIASAFRN |
| | | | | EEYNKSVQEIQATFFYF |
| | | | | TPNKTEDTIFLREYQTR |
| | | | | QNQCFYNSSYLNVQRE |
| | | | | NGTVSRYEGGREHVAH |
| | | | | LLFLRDTKTLMFGSYLD |
| | | | | DEKNWGLSFYADKPET |
| | | | | TKEQLGEFYEALDCLCI |
| | | | | PRSDVMYTDWKKDKCE |
| | | | | PLEKQHEKERKQEEGES |
| 1000 | APOD | Apolipoprotein | P05090 | MVMLLLLLSALAGLFG |
| | | D | | AAEGQAFHLGKCPNPP |
| | | | | VQENFDVNKYLGRWYE |
| | | | | IEKIPTTFENGRCIQANY |
| | | | | SLMENGKIKVLNQELRA |
| | | | | DGTVNQIEGEATPVNLT |
| | | | | EPAKLEVKFSWFMPSAP |
| | | | | YWILATDYENYALVYS |
| | | | | CTCIIQLFHVDFAWILAR |
| | | | | NPNLPPETVDSLKNILTS |
| | | | | NNIDVKKMTVTDQVNC |
| | | | | PKLS |
| 1001 | TRFE | Serotransferrin | P02787 | MRLAVGALLVCAVLGL |
| | | | | CLAVPDKTVRWCAVSE |
| | | | | HEATKCQSFRDHMKSVI |
| | | | | PSDGPSVACVKKASYLD |
| | | | | CIRAIAANEADAVTLDA |
| | | | | GLVYDAYLAPNNLKPV |
| | | | | VAEFYGSKEDPQTFYYA |
| | | | | VAVVKKDSGFQMNQLR |
| | | | | GKKSCHTGLGRSAGWN |
| | | | | IPIGLLYCDLPEPRKPLE |
| | | | | KAVANFFSGSCAPCAD |
| | | | | GTDFPQLCQLCPGCGCS |
| | | | | TLNQYFGYSGAFKCLK |
| | | | | DGAGDVAFVKHSTIFEN |
| | | | | LANKADRDQYELLCLD |
| | | | | NTRKPVDEYKDCHLAQ |
| | | | | VPSHTVVARSMGGKED |
| | | | | LIWELLNQAQEHFGKD |
| | | | | KSKEFQLFSSPHGKDLL |
| | | | | FKDSAHGFLKVPPRMD |
| | | | | AKMYLGYEYVTAIRNL |
| | | | | REGTCPEAPTDECKPVK |
| | | | | WCALSHHERLKCDEWS |
| | | | | VNSVGKIECVSAETTED |
| | | | | CIAKIMNGEADAMSLD |
| | | | | GGFVYIAGKCGLVPVLA |
| | | | | ENYNKSDNCEDTPEAG |
| | | | | YFAIAVVKKSASDLTW |
| | | | | DNLKGKKSCHTAVGRT |
| | | | | AGWNIPMGLLYNKINH |
| | | | | CRFDEFFSEGCAPGSKK |
| | | | | DSSLCKLCMGSGLNLCE |
| | | | | PNNKEGYYGYTGAFRC |
| | | | | LVEKGDVAFVKHQTVP |
| | | | | QNTGGKNPDPWAKNLN |
| | | | | EKDYELLCLDGTRKPVE |
| | | | | EYANCHLARAPNHAVV |
| | | | | TRKDKEACVHKILRQQ |
| | | | | QHLFGSNVTDCSGNFCL |
| | | | | FRSETKDLLFRDDTVCL |
| | | | | AKLHDRNTYEKYLGEE |
| | | | | YVKAVGNLRKCSTSSLL |
| | | | | EACTFRRP |

TABLE 78
Glycopeptides Associated with NSCLC

| | | | Linking | Linking | |
|---|---|---|---|---|---|
| | | | Site | Site | |
| | Peptide | | Pos. in | Pos. in | Glycan |
| SEQ ID | Structure | Peptide | Protein | Peptide | Structure |
| NO. | (PS) NAME | Sequence | Sequence | Sequence | GL NO. |
| 1002 | A1AT_271_5401 | YLGNATAIFFLPDEGK | 271 | 4 | 5401 |
| 1003 | A1AT_271_5402 | YLGNATAIFFLPDEGK | 271 | 4 | 5402 |
| 1004 | AGP1 | YVGGQEHFAHLLILR | n/a | n/a | n/a |
| 1005 | AGP1_93_7612 | QDQCIYNTTYLNVQR | 93 | 7 | 7612 |
| 1006 | AGP12* | TEDTIFLR | n/a | n/a | n/a |
| 1007 | APOD_98_5412 | ADGTVNQIEGEATPVN | 98 | 16 | 5412 |
| | | LTEPAK | | | |
| 1008 | TRFE_630_5401 | QQQHLFGSNVTDCSG | 630 | 9 | 5401 |
| | | NFCLFR | | | |

TABLE 79
Protein abbreviation, glycosylation site, glycan structure, precursor
ion m/z, and product ion m/z for transitions associated with NSCLC

| SEQ | | Collision | 1^{st} | 1^{st} | 2^{nd} | 2^{nd} | 1^{st} | 2^{nd} |
|---|---|---|---|---|---|---|---|---|
| ID | RT | Energy | Precursor | Precursor | Precursor | Precursor | Product | Product |
| NO. | (min) | (V) | m/z | Charge | m/z | Charge | m/z | m/z |
| 1002 | 37.5 | 30 | 1224.5 | 3 | N/A | N/A | 366.1 | 980 |
| 1003 | 38.2 | 24 | 991.2 | 4 | N/A | N/A | 366.1 | 980.5 |
| 1004 | 28.2 | 33 | 877 | 2 | N/A | N/A | 745.9 | 982.6 |
| 1005 | 22.6 | 31 | 1250.3 | 4 | N/A | N/A | 366.1 | N/A |
| 1006 | 21.9 | 15 | 497.8 | 2 | N/A | N/A | 764.4 | 649.4 |
| 1007 | 24.1 | 30 | 1152.5 | 4 | N/A | N/A | 274.1 | N/A |
| 1008 | 31.4 | 27 | 1108.4 | 4 | N/A | N/A | 366.1 | 1359.6 |

TABLE 80
Glycan Structures

| Glycan Structure | | |
|---|---|---|
| GL NO. | Symbol Structure | Composition |
| 5401 | [symbol] | Hex(5)HexNAc(4)Fuc(0)NeuAc(1) |
| 5402 | [symbol] | Hex(5)HexNAc(4)Fuc(0)NeuAc(2) |
| 5412 | [symbol] | Hex(5)HexNAc(4)Fuc(1)NeuAc(2) |
| 7612 | [symbol] | Hex(7)HexNAc(6)Fuc(1)NeuAc(2) |

Legend for Table 80
● Glc [symbol]
Gal [symbol]
Man [symbol]
Fuc [symbol]
Neu5Ac
▪ GlcNAc [symbol]
GalNAc [symbol]
ManNAc

In some embodiments, a sample from a patient is analyzed by MS and the results are used to determine the presence, absolute amount, and/or relative amount of a glycopeptide consisting of an amino acid sequence selected from SEQ ID NO: 1002-1008 in the sample. In some embodiments, a sample from a patient is analyzed by MS and the results are used to determine the presence, absolute amount, and/or relative amount of a glycopeptide consisting essentially of an amino acid sequence selected from SEQ ID NO: 1002-1008 in the sample. In some embodiments, a sample from a patient is analyzed by MS and the results are used to determine the presence, absolute amount, and/or relative amount of a glycopeptide consisting of, or consisting essentially of, an amino acid sequence selected from SEQ ID NO: 1002-1008 in the sample. In some embodiments, a sample from a patient is analyzed by MS and the results are used to determine the presence, absolute amount, and/or relative amount of a glycopeptide consisting of, or consisting essentially of, an amino acid sequence selected from SEQ ID NO: 1002-1008 in the sample. In some embodiments, the presence, absolute amount, and/or relative amount of a glycopeptide is determined by analyzing the MS results. In some embodiments, the MS results are analyzed using machine-learning. Provided herein are biomarkers selected from glycans, peptides, glycopeptides, fragments thereof, and combinations thereof. In some embodiments, the glycopeptide comprise an amino acid sequence selected from SEQ ID NO: 1002-1008. In some embodiments, the glycopeptide consists essentially of an amino acid sequence selected from SEQ ID NO: 1002-1008.

### O-Glycosylation

In some examples, the glycopeptides set forth herein include O-glycosylated peptides. These peptides include glycopeptides in which a glycan is bonded to the peptide through an oxygen atom of an amino acid. Typically, the amino acid to which the glycan is bonded is threonine (T) or serine (S). In some examples, the amino acid to which the glycan is bonded is threonine (T). In some examples, the amino acid to which the glycan is bonded is serine (S).

### N-Glycosylation

In some examples, the glycopeptides set forth herein include N-glycosylated peptides. These peptides include glycopeptides in which a glycan is bonded to the peptide through a nitrogen atom of an amino acid. Typically, the amino acid to which the glycan is bonded is asparagine (N) or arginine (R). In some examples, the amino acid to which the glycan is bonded is asparagine (N). In some examples, the amino acid to which the glycan is bonded is arginine (R).
In certain examples, the N-glycosylated peptides include members selected from the group consisting of Alpha-1-antitrypsin (AlAT), Alpha-1-acid glycoprotein 1 & 2 (AGP12), Alpha-1-acid glycoprotein 1 (AGP1), Alpha-1-acid glycoprotein 2 (AGP2), Apolipoprotein D (APOD), Serotransferrin (TRFE), and combinations thereof.

### Peptides and Glycopeptides

[1303] In some examples, set forth herein is a glycopeptide or peptide consisting of an amino acid sequence selected from the group consisting of SEQ ID NO: 1002-1008.

[1304] In some examples, set forth herein is a glycopeptide or peptide consisting essentially of an amino acid sequence selected from the group consisting of SEQ ID NO: 1002-1008.

[1305] In some examples, set forth herein is a glycopeptide or peptide comprising an amino acid sequence selected from the group consisting of SEQ ID NO: 1002-1008. In some embodiments, the glycopeptide or peptide is between about 5 to about 50 amino acids in length. In some embodiments, the glycopeptide or peptide is between about 5 to about 20 amino acids in length. In some embodiments, the glycopeptide or peptide is between about 5 to about 15 amino acids in length.

### III. METHODS

[1306] Provided herein are methods of identifying the glycoproteomic biomarkers and signatures that may be used to predict which cancer patients respond to pembrolizumab therapy, and have an improvement or a positive change in their condition.

[1307] In some embodiments, individual glycopeptide expression levels are associated with various timepoints to determine which glycopeptides changed with events, such as death or metastasis, at the various timepoints. In some embodiments, individual glycopeptide expression levels are associated with time from treatment initiation to death (overall survival, OS) in the patient cohorts.

[1308] In some embodiments, multivariable models are used to predict OS in cancer patients. In some embodiments, the cancer patients have NSCLC. In some embodiments, a small subset of glycopeptides for modeling are selected, a model is built and trained based on a training subset of patient data, and a survival score is predicted for each patient based on the trained model. In some embodiments, the resulting scores are dichotomized at a cutoff which optimizes Harrell's C-index. In some embodiments, the resulting scores are dichotomized at a cutoff which optimizes hazard ratio.

[1309] In some embodiments, hazard ratio (HR), p-value, and interaction P-value were calculated. In some embodiments, hazard ratio (HR) is calculated from a Cox Proportional Hazards model, representing the multiplicative increase in odds of death for each increase of the biomarker by 1 unit. In some embodiments, p-value is associated with the HR above. In some embodiments, P<0.01 was considered significant. In some embodiments, P<0.05, P<0.01, P<0.005, or P<0.001 was considered significant.

[1310] In some embodiments, the model helped to determine whether the glycopeptide marker individually is predictive of OS. In some embodiments, the model helped to determine whether the glycopeptide marker individually is of use in treatment selection or varied with and without treatment. In some embodiments, individual Kaplan-Meier (KM) curves are plotted for the markers relevant in each disease for each outcome, such as OS. In some embodiments, hazard ratios and p-values on the plots are representative of the plotted high/low split at median biomarker expression. Examples of such multivariate KM curves generated from the individual KM curves are seen in FIGS. 147A and 147B.

### Methods for Detecting Glycopeptides

[1311] In some embodiments, provided herein are methods for detecting one or more a multiple-reaction-monitoring (MRM) transition, comprising: obtaining a biological sample from a patient, wherein the biological sample comprises one or more glycopeptides; digesting and/or fragmenting a glycopeptide in the sample; and detecting a multiple-reaction-monitoring (MRM) transition.

[1312] In some embodiments, provided herein are methods of detecting one or more glycopeptides, wherein each glycopeptide is individually in each instance selected from a glycopeptide consisting of an amino acid sequence selected from the group consisting of SEQ ID NO: 1002-1008. In some embodiments, provided herein are methods of detecting one or more glycopeptides, wherein each glycopeptide is individually in each instance selected from a glycopeptide consisting essentially of an amino acid sequence selected from the group consisting of SEQ ID NO: 1002-1008.

[1313] In some embodiments, provided herein are methods of detecting one or more glycopeptides. In some examples, set forth herein is a method of detecting one or more glycopeptide fragments. In certain examples, the method includes detecting the glycopeptide group to which the glycopeptide, or fragment thereof, belongs. In some of these examples, the glycopeptide group is selected from Alpha-1-antitrypsin (AlAT), Alpha-1-acid glycoprotein 1 & 2 (AGP12), Alpha-1-acid glycoprotein 1 (AGP1), Alpha-1-acid glycoprotein 2 (AGP2), Apolipoprotein D (APOD), Serotransferrin (TRFE), and combinations thereof.

[1314] In some embodiments, provided herein are methods comprising detecting a glycopeptide, a glycan on the glycopeptide and the glycosylation site residue where the glycan bonds to the glycopeptide. In some embodiments, the method includes detecting a glycan residue. In some embodiments, the method includes detecting a glycosylation site on a glycopeptide. In some embodiments, this process is accomplished with mass spectroscopy used in tandem with liquid chromatography.

[1315] In some embodiments, provided herein are methods comprising obtaining a biological sample from a patient. In some examples, the biological sample is synovial fluid, whole blood, blood serum, blood plasma, urine, sputum, tissue, saliva, tears, spinal fluid, tissue section(s) obtained by biopsy; cell(s) that are placed in or adapted to tissue culture; sweat, mucous, fecal material, gastric fluid, abdominal fluid, amniotic fluid, cyst fluid, peritoneal fluid, pancreatic juice, breast milk, lung lavage, bone marrow, gastric acid, bile, semen, pus, aqueous humor, transudate, or combinations of the foregoing. In some examples, the biological sample is selected from the group consisting of blood, plasma, saliva, mucus, urine, stool, tissue, sweat, tears, hair, or a combination thereof. In some examples, the biological sample is a blood sample. In some examples, the biological sample is a plasma sample. In some examples, the biological sample is a saliva sample. In some examples, the biological sample is a mucus sample. In some examples, the biological sample is a urine sample. In some examples, the biological sample is a stool sample. In some examples, the biological sample is a sweat sample. In some examples, the biological sample is a tear sample. In some examples, the biological sample is a hair sample.

[1316] In some examples, the method comprises digesting and/or fragmenting a glycopeptide in the sample. In some examples, the method includes digesting a glycopeptide in the sample. In some examples, the method includes fragmenting a glycopeptide in the sample. In some examples, the digested or fragmented glycopeptide is analyzed using mass spectroscopy. In some examples, the glycopeptide is digested or fragmented in the solution phase using digestive enzymes. In some examples, the glycopeptide is digested or fragmented in the gaseous phase inside a mass spectrometer, or the instrumentation associated with a mass spectrometer. In some examples, the mass spectroscopy results are analyzed using machine-learning algorithms. In some examples, the mass spectroscopy results are the quantification of the glycopeptides, glycans, peptides, and fragments thereof. In some examples, this quantification is used as an input in a trained model to generate an output probability. The output probability is a probability of being within a given category or classification, e.g., the classification of being likely to respond to pembrolizumab therapy or not being likely to respond to pembrolizumab therapy.

[1317] In some examples, the mass spectrometry is performed using multiple reaction monitoring (MRM) mode. In some examples, the mass spectrometry is performed using qTOF MS in data-dependent acquisition. In some examples, the mass spectrometry is performed using MS-only mode.

[1318] In some examples, the method comprises introducing the sample, or a portion thereof, into a mass spectrometer. In some examples, the method comprises fragmenting a glycopeptide in the sample after introducing the sample, or a portion thereof, into the mass spectrometer. In some examples, the method includes digesting a glycopeptide in the sample occurs before introducing the sample, or a portion thereof, into the mass spectrometer. In some examples, the method comprises fragmenting a glycopeptide in the sample to provide a glycopeptide ion, a peptide ion, a glycan ion, a glycan adduct ion, or a glycan fragment ion. In some examples, the method comprises digesting and/or fragmenting a glycopeptide in the sample to provide one or more glycopeptides consisting of an amino acid sequence selected from the group consisting of SEQ ID NO: 1002-1008. In some examples, the method comprises digesting and/or fragmenting a glycopeptide in the sample to provide one or more glycopeptides consisting essentially of an amino acid sequence selected from the group consisting of SEQ ID NO: 1002-1008.

[1319] In some examples, the method includes detecting an MRM transition indicative of a glycopeptide or glycan residue, wherein the glycopeptide consists essentially of an amino acid sequence selected from the group consisting of SEQ ID NO: 1002-1008. In some examples, the method includes detecting an MRM transition indicative of a glycopeptide consisting essentially of an amino acid sequence selected from the group consisting of SEQ ID NO: 1002-1008. In some examples, the method includes detecting more than one MRM transition indicative of a combination of glycopeptides having amino acid sequences selected from a combination of SEQ ID NO: 1002-1008.

[1320] In some examples, the method includes detecting a MRM transition indicative of a glycopeptide or glycan residue, wherein the glycopeptide consists essentially of an amino acid sequence selected from the group consisting of SEQ ID NO: 1002-1008. In some examples, the method includes detecting a MRM transition indicative of a glycopeptide consisting essentially of an amino acid sequence selected from the group consisting of SEQ ID NO: 1002-1008.

[1321] In some examples, the method includes detecting a MRM transition indicative of a glycopeptide or glycan residue, wherein the glycopeptide consists essentially of an amino acid sequence selected from the group consisting of SEQ ID NOs: 1002-1008.

[1322] In some examples, the method comprises performing mass spectroscopy on the biological sample using multiple-reaction-monitoring mass spectroscopy (MRM-MS).

[1323] In some examples, the method includes digesting a glycoprotein in the sample to provide one or more glycopeptides consisting essentially of an amino acid sequence selected from the group consisting of SEQ ID NO: 1002-1008. In some examples, the biological sample is combined with chemical reagents. In some examples, the biological sample is combined with enzymes. In some examples, the enzymes are lipases. In some examples, the enzymes are proteases. In some examples, the enzymes are serine proteases. In some examples, the enzyme is selected from the group consisting of trypsin, chymotrypsin, thrombin, elastase, and subtilisin. In some examples, the enzyme is trypsin. In some examples, the methods comprises contacting at least two proteases with a glycopeptide in a sample. In some examples, the at least two proteases are selected from the group consisting of serine protease, threonine protease, cysteine protease, aspartate protease. In some examples, the at least two proteases are selected from the group consisting of trypsin, chymotrypsin, endoproteinase, Asp-N, Arg-C, Glu-C, Lys-C, pepsin, thermolysin, elastase, papain, proteinase K, subtilisin, clostripain, and carboxypeptidase protease, glutamic acid protease, metalloprotease, and asparagine peptide lyase.

[1324] In some examples, the method includes detecting an MRM transition indicative of a glycopeptide or glycan residue, wherein the glycopeptide consisting of, or consisting essentially of, an amino acid sequence selected from the group consisting of SEQ ID NO: 1002-1008. In some examples, the method includes detecting an MRM transition indicative of a glycopeptide or glycan residue, wherein the glycopeptide consists essentially of an amino acid sequence selected from the group consisting of SEQ ID NO: 1002-1008. In some examples, the method includes detecting an MRM transition indicative of a glycopeptide consisting essentially of an amino acid sequence selected from the group consisting of SEQ ID NO: 1002-1008. In some examples, the method includes detecting more than one MRM transition indicative of a combination of glycopeptides having amino acid sequences selected from a combination of SEQ ID NO: 1002-1008.

[1325] In some examples, the method includes detecting a MRM transition indicative of a glycopeptide or glycan residue, wherein the glycopeptide consists essentially of an amino acid sequence selected from the group consisting of SEQ ID NO: 1002-1008.

[1326] In some examples, the method comprises performing mass spectrometry on the biological sample using multiple-reaction-monitoring mass spectrometry (MRM-MS).

[1327] In some examples, the method comprises digesting a glycopeptide in the sample to provide a glycopeptide consisting of an amino acid sequence selected from the group consisting of SEQ ID NO: 1002-1008. In some examples, the biological sample is contacted with one or more chemical reagents. In some examples, the biological sample is contacted with one or more enzymes. In some examples, the enzymes are lipases. In some examples, the enzymes are proteases. In some examples, the enzymes are serine proteases. In some examples, the enzyme is selected from the group consisting of trypsin, chymotrypsin, thrombin, elastase, and subtilisin. In some of these examples, the enzyme is trypsin. In some examples, the methods include contacting at least two proteases with a glycopeptide in a sample. In some examples, the at least two proteases are selected from the group consisting of serine protease, threonine protease, cysteine protease, aspartate protease. In some examples, the at least two proteases are selected from the group consisting of trypsin, chymotrypsin, endoproteinase, Asp-N, Arg-C, Glu-C, Lys-C, pepsin, thermolysin, elastase, papain, proteinase K, subtilisin, clostripain, and carboxypeptidase protease, glutamic acid protease, metalloprotease, and asparagine peptide lyase.

[1328] In some examples, the method includes conducting tandem liquid chromatography-mass spectrometry on the biological sample. In some examples, the method includes conducting multiple-reaction-monitoring mass spectrometry (MRM-MS) on the biological sample. In some examples, the method includes detecting an MRM transition using a triple quadrupole (QQQ) and/or a quadrupole time-of-flight (qTOF) mass spectrometer. In some examples, the method includes detecting an MRM transition using a QQQ mass spectrometer. In some examples, the method includes detecting using a qTOF mass spectrometer. In some examples, a suitable instrument for use with the instant methods is an Agilent 6495B Triple Quadrupole LC/MS. In some examples, the method includes detecting using a QQQ mass spectrometer. In some examples, a suitable instrument for use with the instant methods is an Agilent 6545 LC/Q-TOF.

[1329] In some examples, the method comprises detecting more than one MRM transition using a QQQ and/or qTOF mass spectrometer. In some examples, the method includes detecting more than one MRM transition using a QQQ mass spectrometer. In some examples, the method includes detecting more than one MRM transition using a qTOF mass spectrometer. In some examples, the method includes detecting more than one MRM transition using a QQQ mass spectrometer.

[1330] In some examples, the methods herein include quantifying one or more glycomic parameters of the one or more biological samples comprises employing a coupled chromatography procedure. In some examples, these glycomic parameters include the identification of a glycopeptide group, identification of glycans on the glycopeptide, identification of a glycosylation site, identification of part of an amino acid sequence which the glycopeptide includes. In some examples, the coupled chromatography procedure comprises: performing or effectuating a liquid chromatography-mass spectrometry (LC-MS) operation. In some examples, the coupled chromatography procedure comprises: performing or effectuating a multiple reaction monitoring mass spectrometry (MRM-MS) operation. In some examples, the methods herein include a coupled chromatography procedure which comprises: performing or effectuating a liquid chromatography-mass spectrometry (LC-MS) operation; and effectuating a multiple reaction monitoring mass spectrometry (MRM-MS) operation. In some examples, the methods include training a machine-learning algorithm using one or more glycomic parameters of the one or more biological samples obtained by one or more of a triple quadrupole (QQQ) mass spectrometry operation and/or a quadrupole time-of-flight (qTOF) mass spectrometry operation. In some examples, the methods include training a machine-learning algorithm using one or more glycomic parameters of the one or more biological samples obtained by a triple quadrupole (QQQ) mass spectrometry operation. In some examples, the methods include training a machine-learning algorithm using one or more glycomic parameters of the one or more biological samples obtained by a quadrupole time-of-flight (qTOF) mass spectrometry operation. In some examples, the methods include quantifying one or more glycomic parameters of the one or more biological samples comprises employing one or more of a triple quadrupole (QQQ) mass spectrometry operation and a quadrupole time-of-flight (qTOF) mass spectrometry operation. In some examples, machine-learning algorithms are used to quantify these glycomic parameters. In some examples, including any of the foregoing, the mass spectrometry is performed using multiple reaction monitoring (MRM) mode. In some examples, the mass spectrometry is performed using qTOF MS in data-dependent acquisition. In some examples, the mass spectrometry is performed using MS-only mode.

[1331] In some examples, the method includes detecting one or more MRM transitions indicative of glycans. In some examples, the method comprises quantifying a glycan. In some examples, the method comprises quantifying a first glycan and quantifying a second glycan; and further comprising comparing the quantification of the first glycan with the quantification of the second glycan. In some examples, the method comprises associating the detected glycan with a peptide residue site, whence the glycan was bonded. In some examples, the method comprises generating a glycosylation profile of the sample. In some examples, the method comprises associating the detected glycan with a timepoint.

[1332] In some examples, the method includes spatially profiling glycans on a tissue section associated with the sample. In some examples, including any of the foregoing, the method includes spatially profiling glycopeptides on a tissue section associated with the sample. In some examples, the method includes matrix-assisted laser desorption ionization time-of-flight (MALDI-TOF) mass spectrometry in combination with the methods herein.

[1333] In some examples, the method includes quantifying relative abundance of a glycan and/or a peptide.

[1334] In some examples, the method includes normalizing the amount of a glycopeptide by quantifying a glycopeptide consisting essentially of an amino acid sequence selected from the group consisting of SEQ ID NO: 1002-1008 and comparing that quantification to the amount of another chemical species. In some examples, the method includes normalizing the amount of a peptide by quantifying a glycopeptide consisting of an amino acid sequence selected from the group consisting of SEQ ID NO: 1002-1008, and comparing that quantification to the amount of another glycopeptide consisting of an amino acid sequence selected from the group consisting of SEQ ID NO: 1002-1008. In some examples, the method includes normalizing the amount of a peptide by quantifying a glycopeptide consisting essentially of an amino acid sequence selected from the group consisting of SEQ ID NO: 1002-1008, and comparing that quantification to the amount of another glycopeptide consisting essentially of an amino acid sequence selected from the group consisting of SEQ ID NO: 1002-1008.

### Methods for Classifying Samples Comprising Glycopeptides

[1335] In some embodiment, provided herein are methods for identifying a classification for a sample, the method comprising: quantifying by mass spectrometry (MS) one or more glycopeptides in a sample wherein the glycopeptides each, individually in each instance, comprises a glycopeptide consisting essentially of an amino acid sequence selected from the group consisting of, or consisting essentially of SEQ ID NO: 1002-1008; and inputting the quantification into a trained model to generate a output probability; determining if the output probability is above or below a threshold for a classification; and identifying a classification for the sample based on whether the output probability is above or below a threshold for a classification.

[1336] In some examples, set forth herein is a method for classifying a biological sample from a patient with respect to a plurality of states associated with responsiveness to pembrolizumab therapy the method comprising: obtaining a biological sample from the patient; performing mass spectrometry of the biological sample using MRM-MS with a QQQ and/or qTOF spectrometer to detect one or more glycopeptides consisting of, or consisting essentially of, an amino acid sequence selected from the group consisting of SEQ ID NO: 1002-1008; analyzing the detected glycopeptides or the MRM transitions to identify a diagnostic classification.

[1337] In some embodiments, provided herein are methods of classifying a biological sample from a subject with NSCLC with respect to a plurality of states associated with responsiveness to pembrolizumab therapy the method comprising receiving peptide structure data, inputting quantification data from the peptide structure data into a machine-learning model, identifying, by the machine-learning model a risk score, and classifying the biological sample with respect to a plurality of states based upon the risk score. In some embodiments, the classification is likelihood of response or likelihood of non-response to pembrolizumab. In some embodiments, the classification is likely to benefit from pembrolizumab therapy or not likely to benefit from pembrolizumab therapy. In some embodiments, the risk score represents the likelihood that a subject who is not likely to benefit from the pembrolizumab therapy has an increased risk of death due to administration of pembrolizumab therapy. Ins some embodiments, the risk score represents a risk to the subject of receiving pembrolizumab therapy. In some embodiments, the risk score represents a risk to the subject of not receiving pembrolizumab therapy.

[1338] In some embodiments, the method further comprises producing a treatment output. In some embodiments, the treatment output is based upon the classification of likely response to pembrolizumab or likely nonresponse to pembrolizumab. In some embodiments, the treatment output is based upon a risk score for the subject. In some embodiments, a risk score above a certain threshold is associated with a particular treatment output and a risk score below a certain threshold is associated with a particular treatment output.

[1339] In some examples, provided herein are methods for identifying glycopeptide biomarkers, comprising: obtaining a biological sample from a patient; digesting and/or fragmenting a glycopeptide in the sample; detecting a multiple-reaction-monitoring (MRM) transition; and classifying the glycopeptides based on the MRM transitions detected. In some examples, a machine-learning algorithm is used to train a model using the MRM transitions as inputs. In some examples, a machine-learning algorithm is trained using the MRM transitions as a training data set. In some examples, the methods herein include identifying glycopeptides, peptides, and glycans based on their mass spectrometry relative abundance. In some examples, a machine-learning algorithm or algorithms select and/or identify peaks in a mass spectrometry spectrum. In some examples, the MS is MRM-MS with a QQQ and/or qTOF mass spectrometer.

[1340] In some examples, including any of the foregoing, the mass spectrometry is performed using multiple reaction monitoring (MRM) mode. In some examples, the mass spectrometry is performed using qTOF MS in data-dependent acquisition mode. In some examples, the mass spectrometry is performed using MS-only mode.

[1341] In some examples, the machine-learning algorithm is selected from the group consisting of a deep learning algorithm, a neural network algorithm, an artificial neural network algorithm, a supervised machine-learning algorithm, a linear discriminant analysis algorithm, a quadratic discriminant analysis algorithm, a support vector machine algorithm, a linear basis function kernel support vector algorithm, a radial basis function kernel support vector algorithm, a random forest algorithm, a genetic algorithm, a nearest neighbor algorithm, k-nearest neighbors, a naive Bayes classifier algorithm, a logistic regression algorithm, or a combination thereof. In certain examples, the machine-learning algorithm is a generalized additive model (GAM) regression. For reference, GAM can have relationships between the individual predictors and the dependent variable to provide smooth patterns that can be linear or nonlinear.

[1342] In some examples, the method includes classifying a sample as within, or embraced by, a disease classification or a disease severity classification.

[1343] In some examples, the classification is identified with 80% confidence, 85% confidence, 90% confidence, 95% confidence, 99% confidence, or 99.9999% confidence.

[1344] In some examples, the method includes quantifying by MS the glycopeptide in a sample at a first time point; quantifying by MS the glycopeptide in a sample at a second time point; and comparing the quantification at the first time point with the quantification at the second time point.

[1345] In some examples, the method includes quantifying by MS a different glycopeptide in a sample at a third time point; quantifying by MS the different glycopeptide in a sample at a fourth time point; and comparing the quantification at the fourth time point with the quantification at the third time point.

[1346] In some examples, the method includes monitoring the health status of a patient.

[1347] In some examples, monitoring the health status of a patient includes monitoring the onset and progression of disease in a patient with risk factors such as genetic mutations, as well as detecting cancer recurrence.

[1348] In some examples, the method includes diagnosing a patient with a disease or condition based on the quantification. In some examples, the method includes treating the patient with a therapeutically effective amount of a therapeutic agent comprising one or more of a chemotherapeutic, an immunotherapy, a hormone therapy, a targeted therapy, a neoadjuvant therapy, and surgery. In some embodiments, the treatment comprises checkpoint inhibitors. In some examples, the method includes diagnosing an individual with a disease or condition based on the quantification. In some examples, the method includes treating the individual with a therapeutically effective amount of a treatment.

### Methods for Treatment Management of Patients

[1349] In some examples, provided herein are methods for managing treatment of a subject diagnosed with NSCLC comprising measuring by mass spectrometry a glycopeptide in a sample from the patient.

[1350] In another embodiment, provided herein are methods for managing treatment of a patient having NSCLC; the method comprising: obtaining a biological sample from the patient; performing mass spectrometry of the biological sample using MRM-MS with a QQQ and/or qTOF spectrometer to detect and quantify one or more glycopeptides consisting essentially of an amino acid sequence selected from the group consisting of SEQ ID NO: 1002-1008; inputting the quantification of the detected glycopeptides or the MRM transitions into a trained model to generate an output probability, determining if the output probability is above or below a threshold for a classification; and identifying a diagnostic classification for the patient based on whether the output probability is above or below a threshold for a classification; and managing treatment of the patient as having NSCLC based on the classification.

[1351] In another embodiment, set forth herein is a method for managing treatment of a subject with NSCLC inputting the quantification of detected glycopeptides or MRM transitions into a trained model to generate an output probability, determining if the output probability is above or below a threshold for a classification; and identifying a diagnostic classification for the patient based on whether the output probability is above or below a threshold for a classification; and managing treatment of the patient as based on the classification. In some examples, the method includes obtaining a biological sample from the subject; performing mass spectrometry of the biological sample using MRM-MS with a QQQ and/or qTOF spectrometer to detect and quantify one or more glycopeptides consisting essentially of an amino acid sequence selected from the group consisting of SEQ ID NO: 1002-1008.

[1352] In some examples, set forth herein is a method for managing treatment of a patient having NSCLC; the method comprising: obtaining a biological sample from the patient; performing mass spectrometry of the biological sample using MRM-MS with a QQQ and/or qTOF spectrometer to detect one or more glycopeptides consisting of, or consisting essentially of, an amino acid sequence selected from the group consisting of SEQ ID NO: 1002-1008; analyzing the detected glycopeptides or the MRM transitions to identify a classification; and managing treatment of the patient based on the diagnostic classification.

[1353] In some examples, set forth herein is a method for managing treatment of a patient having NSCLC; the method comprising: analyzing detected or quantified glycopeptides or MRM transitions to identify a classification; and managing treatment of the patient based on the classification. In some examples, the method includes obtaining a biological sample from the patient; and performing mass spectrometry of the biological sample using MRM-MS with a QQQ and/or qTOF spectrometer to detect one or more glycopeptides consisting of, or consisting essentially of, an amino acid sequence selected from the group consisting of SEQ ID NO: 1002-1008.

[1354] In some embodiments, provided herein are methods for determining whether a subject diagnosed with non-small-cell lung cancer (NSCLC) will benefit from pembrolizumab therapy comprising detecting one or more biomarkers. In some embodiments, the one or more biomarkers comprise one or more glycopeptides. In some embodiments, the one or more biomarkers comprises one or more peptide structures set forth in Table 78. In some embodiments, the method comprises detecting one or more glycopeptides comprising a sequence set forth in SEQ ID NO: 1002-1008. In some embodiments, the method comprises detecting two or more glycopeptides comprising a sequence set forth in SEQ ID NO: 1002-1008. In some embodiments, the method comprises detecting three or more glycopeptides comprising a sequence set forth in SEQ ID NO: 1002-1008. In some embodiments, the method comprises detecting four or more glycopeptides comprising a sequence set forth in SEQ ID NO: 1002-1008. In some embodiments, the method comprises detecting five or more glycopeptides comprising a sequence set forth in SEQ ID NO: 1002-1008. In some embodiments, the method comprises detecting six or more glycopeptides comprising a sequence set forth in SEQ ID NO: 1002-1008. In some embodiments, the method comprises detecting each of the glycopeptides comprising a sequence set forth in SEQ ID NO: 1002-1008. In some embodiments, the glycopeptide comprises a glycan with the structures in Table 78. In some embodiments, the glycopeptide is a glycopeptide of a glycoprotein provided in Table 77. In some embodiments, the glycopeptide is a glycopeptide of a glycoprotein comprising a sequence set forth in SEQ ID NO: 997-1001.

[1355] In some embodiments, the determination of whether a subject diagnosed with NSCLC will benefit from pembrolizumab therapy is based upon presence and/or amount of at least one, at least two, at least three, at least four, at least five, at least six, or seven peptide structures from Table 78. In some embodiments, the determination is based upon the presence and/or amount of one or more peptides comprising the amino acid sequence of SEQ ID NO: 1002-1008. In some embodiments, the determination is based upon the presence and/or amount of two or more peptides comprising the amino acid sequence of SEQ ID NO: 1002-1008. In some embodiments, the determination is based upon the presence and/or amount of three or more peptides comprising the amino acid sequence of SEQ ID NO: 1002-1008. In some embodiments, the determination is based upon the presence and/or amount of four or more peptides comprising the amino acid sequence of SEQ ID NO: 1002-1008. In some embodiments, the determination is based upon the presence and/or amount of five or more peptides comprising the amino acid sequence of SEQ ID NO: 1002-1008. In some embodiments, the determination is based upon the presence and/or amount of six or more peptides comprising the amino acid sequence of SEQ ID NO: 1002-1008. In some embodiments, the determination is based upon the presence and/or amount of each of the peptides comprising the amino acid sequence of SEQ ID NO: 1002-1008. In some embodiments, the glycopeptide is a glycopeptide of a glycoprotein provided in Table 77. In some embodiments, the glycopeptide is a glycopeptide of a glycoprotein comprising a sequence set forth in SEQ ID NO: 1-5.

[1356] In some embodiments, the determination is based upon the presence and/or amount of one or more peptides consisting of the amino acid sequence of SEQ ID NO: 1002-1008. In some embodiments, the determination is based upon the presence and/or amount of two or more peptides consisting of the amino acid sequence of SEQ ID NO: 1002-1008. In some embodiments, the determination is based upon the presence and/or amount of three or more peptides consisting of the amino acid sequence of SEQ ID NO: 1002-1008. In some embodiments, the determination is based upon the presence and/or amount of four or more peptides consisting of the amino acid sequence of SEQ ID NO: 1002-1008. In some embodiments, the determination is based upon the presence and/or amount of five or more peptides consisting of the amino acid sequence of SEQ ID NO: 1002-1008. In some embodiments, the determination is based upon the presence and/or amount of six or more peptides consisting of the amino acid sequence of SEQ ID NO: 1002-1008. In some embodiments, the determination is based upon the presence and/or amount of each of the peptides consisting of the amino acid sequence of SEQ ID NO: 1002-1008. In some embodiments, the glycopeptide is a glycopeptide of a glycoprotein provided in Table 77. In some embodiments, the glycopeptide is a glycopeptide of a glycoprotein comprising a sequence set forth in SEQ ID NO: 1-5.

[1357] In some embodiments, the determination is based upon the presence and/or amount of one or more peptides comprising the amino acid sequence of SEQ ID NO: 1002-1008. In some embodiments, the determination is based upon the presence and/or amount of two or more peptides comprising the amino acid sequence of SEQ ID NO: 1002-1008. In some embodiments, the determination is based upon the presence and/or amount of three or more peptides comprising the amino acid sequence of SEQ ID NO: 1002-1008. In some embodiments, the determination is based upon the presence and/or amount of four or more peptides comprising the amino acid sequence of SEQ ID NO: 1002-1008. In some embodiments, the determination is based upon the presence and/or amount of five or more peptides comprising the amino acid sequence of SEQ ID NO: 1002-1008. In some embodiments, the determination is based upon the presence and/or amount of six or more peptides comprising the amino acid sequence of SEQ ID NO: 1002-1008. In some embodiments, the determination is based upon the presence and/or amount of each of the peptides comprising the amino acid sequence of SEQ ID NO: 1002-1008. In some embodiments, a peptide comprising the amino acid sequence set forth in SEQ ID NO:8 and/or SEQ ID NO:10 is detected. In some embodiments, the glycopeptide is a glycopeptide of a glycoprotein provided in Table 77. In some embodiments, the glycopeptide is a glycopeptide of a glycoprotein comprising a sequence set forth in SEQ ID NO: 1-5.

[1358] In some embodiments, the determination is based upon the presence and/or amount of one or more peptides consisting of the amino acid sequence of SEQ ID NO: 1002-1008. In some embodiments, the determination is based upon the presence and/or amount of two or more peptides consisting of the amino acid sequence of SEQ ID NO: 1002-1008. In some embodiments, the determination is based upon the presence and/or amount of three or more peptides consisting of the amino acid sequence of SEQ ID NO: 1002-1008. In some embodiments, the determination is based upon the presence and/or amount of four or more peptides consisting of the amino acid sequence of SEQ ID NO: 1002-1008. In some embodiments, the determination is based upon the presence and/or amount of five or more peptides consisting of the amino acid sequence of SEQ ID NO: 1002-1008. In some embodiments, the determination is based upon the presence and/or amount of six or more peptides consisting of the amino acid sequence of SEQ ID NO: 1002-1008. In some embodiments, the determination is based upon the presence and/or amount of each of the peptides consisting of the amino acid sequence of SEQ ID NO: 1002-1008. In some embodiments, a peptide comprising the amino acid sequence set forth in SEQ ID NO:1004 and/or SEQ ID NO:1006 is detected. In some embodiments, the glycopeptide is a glycopeptide of a glycoprotein provided in Table 77. In some embodiments, the glycopeptide is a glycopeptide of a glycoprotein comprising a sequence set forth in SEQ ID NO: 997-1001.

### Methods of Treatment

[1359] In some embodiments, provided herein are methods of treating a subject with NSCLC. In some embodiments, the methods comprises detecting one or more peptides or glycopeptides provided herein and administering a treatment based upon the presence, absence, or amount of the glycopeptide. In some embodiments, the treatment is pembrolizumab therapy. In some embodiments, a therapy other than pembrolizubam is administered. In some embodiments, the subject is determined to be suitable for therapy with pembrolizumab based upon the peptides and glycopeptides provided herein.

[1360] In some embodiments, provided herein is a method of treating non-small-cell lung cancer (NSCLC) in an individual based upon the presence, absence, or amount of one or more peptide structures set forth in Table 78. In some embodiments, provided herein is a method of treating non-small-cell lung cancer (NSCLC) in an individual based upon the presence, absence, or amount of two or more peptide structures set forth in Table 78. In some embodiments, provided herein is a method of treating non-small-cell lung cancer (NSCLC) in an individual based upon the presence, absence, or amount of three or more peptide structures set forth in Table 78. In some embodiments, provided herein is a method of treating non-small-cell lung cancer (NSCLC) in an individual based upon the presence, absence, or amount of four or more peptide structures set forth in Table 78. In some embodiments, provided herein is a method of treating non-small-cell lung cancer (NSCLC) in an individual based upon the presence, absence, or amount of five or more peptide structures set forth in Table 78. In some embodiments, provided herein is a method of treating non-small-cell lung cancer (NSCLC) in an individual based upon the presence, absence, or amount of six or more peptide structures set forth in Table 78. In some embodiments, provided herein is a method of treating non-small-cell lung cancer (NSCLC) in an individual based upon the presence, absence, or amount of each of the peptide structures set forth in Table 78. In some embodiments, one or more peptide structures set forth in SEQ ID NO: 1002-1008 is detected. In some embodiments, two or more peptide structures set forth in SEQ ID NO: 1002-1008 are detected. In some embodiments, three or more peptide structures set forth in SEQ ID NO: 1002-1008 are detected. In some embodiments, four or more peptide structures set forth in SEQ ID NO: 1002-1008 are detected. In some embodiments, five or more peptide structures set forth in SEQ ID NO: 1002-1008 are detected. In some embodiments, six or more peptide structures set forth in SEQ ID NO: 1002-1008 are detected. In some embodiments, each of the peptide structures set forth in SEQ ID NO: 1002-1008 is detected. In some embodiments, a peptide comprising the amino acid sequence set forth in SEQ ID NO:8 and/or SEQ ID NO:10 is detected. In some embodiments, the method further comprises delivering a therapeutic agent based upon the presence, absence, or amount of one or more peptide structures set forth in Table 78. In some embodiments, the method further comprises delivering a therapeutic agent based upon the presence, absence, or amount of two or more peptide structures set forth in Table 78. In some embodiments, the method further comprises delivering a therapeutic agent based upon the presence, absence, or amount of three or more peptide structures set forth in Table 78. In some embodiments, the method further comprises delivering a therapeutic agent based upon the presence, absence, or amount of four or more peptide structures set forth in Table 78. In some embodiments, the method further comprises delivering a therapeutic agent based upon the presence, absence, or amount of five or more peptide structures set forth in Table 78. In some embodiments, the method further comprises delivering a therapeutic agent based upon the presence, absence, or amount of six or more peptide structures set forth in Table 78. In some embodiments, the method further comprises delivering a therapeutic agent based upon the presence, absence, or amount of each of the peptide structures set forth in Table 78. In some embodiments, the method comprises selecting a therapeutic agent based upon the presence, absence, or amount of one or more peptide structures set forth in Table 78. In some embodiments, the method comprises selecting a therapeutic agent based upon the presence, absence, or amount of two or more peptide structures set forth in Table 78. In some embodiments, the method comprises selecting a therapeutic agent based upon the presence, absence, or amount of three or more peptide structures set forth in Table 78. In some embodiments, the method comprises selecting a therapeutic agent based upon the presence, absence, or amount of four or more peptide structures set forth in Table 78. In some embodiments, the method comprises selecting a therapeutic agent based upon the presence, absence, or amount of five or more peptide structures set forth in Table 78. In some embodiments, the method comprises selecting a therapeutic agent based upon the presence, absence, or amount of six or more peptide structures set forth in Table 78. In some embodiments, the method comprises selecting a therapeutic agent based upon the presence, absence, or amount of each of the peptide structures set forth in Table 78. In some embodiments, the therapeutic agent is a chemotherapeutic agent and/or a hormone therapy. In some embodiments, the glycopeptide is a glycopeptide of a glycoprotein provided in Table 77. In some embodiments, the glycopeptide is a glycopeptide of a glycoprotein comprising a sequence set forth in SEQ ID NO: 997-1001.

[1361] In some embodiments, the method comprises selecting a therapy to treat NSCLC. In some embodiments, the method of selecting a therapy for NSCLC comprises inputting quantification data identified from peptide structure data for a set of peptides and/or glycopeptides into one or more machine-learning model trained to identify a risk score. In some embodiments, the method of selecting a therapy comprises classifying the sample as being likely to respond or not likely to respond to pembrolizumab based upon the disease indicator. In some embodiments, the therapy is selected based upon presence and/or amount of at least one, at least two, at least three, at least four, at least five, at least six, or seven peptide structures from Table 79. In some embodiments, the therapy is selected based upon presence and/or amount of at least one, at least two, at least three, at least four, at least five, at least six, or seven peptide and/or glycopeptides comprising the amino acid sequence of SEQ ID NO: 1002-1008 along with the associated glycan set forth in Table 79. In some embodiments, the presence, absence, and/or amount of one or more peptides and/or glycopeptide is determined by MRM-MS.

[1362] In some embodiments, a therapy other than pembrolizumab is selected and/or administered based upon the presence, absence and/or amount of one or more glycopeptides provided herie] . In some embodiments, the other therapy is selected from the group comprising a surgery, a chemotherapeutic therapy, a patient-specific therapy, a targeted immunotherapy, a radiation procedure, a radiofrequency ablation (RFA) procedure, or a combination thereof. In some embodiments, the surgery comprises the removal of one or more parts of the lung. In some embodiments, the platinum-coordinating compound comprises one of cisplatin, carboplatin, and nedaplatin. In some embodiments, the chemotherapeutic comprises docetaxel, paclitaxel, albumin-bound paclitaxel, vinorelbine, gemcitabine, irinotecan, pemetrexed, tegafur/gimeracil/oteracil, etoposide, or a combination thereof. In some embodiments, the chemotherapeutic therapy is a platinum-doublet regimen. In some embodiments, the chemotherapeutic therapy is a platinum-triple regimen. In some embodiments, the targeted immunotherapy comprises one or more antibody directed towards an immune system checkpoint protein including but not limited to PD-1, PD-L1, and CTLA-4. In some embodiments, the therapy for NSCLC comprises a combination of one or more antibody that targets PD-1, PD-L1, and CTLA-4. In some embodiments, the targeted therapy comprises one or more patient-specific therapy agent selected based on patient-specific changes in tumor cell gene expression including but not limited to changes in KRAS, EGFR, ALK, ROS1, BRAF, RET, MET, and NTRK genes. In some embodiments, the patient-specific therapy is an inhibitor of an oncogene. In some embodiments, the patient-specific therapy is an inhibitor of one or more of KRAS, EGFR, ALK, ROS1, BRAF, MEK, RET, MET, and NTRK. In some embodiments, the radiation procedure comprises the use of high-energy rays or particles to treat NSCLC. In some embodiments, the brachytherapy comprises the placement of radioactive material in or adjacent to the tumor in the airway (e.g., bronchial tubes).

[1363] In some embodiments, the subject is administered a combination therapy comprising pembrolizumab and chemotherapy based upon the presence, absence, and/or amount of one or more peptides or glycopeptides provided herein. In some embodiments, the chemotherapy therapy comprises a platinum-coordinating compound, a chemotherapeutic, or a combination thereof. In some embodiments, the platinum-coordinating compound comprises one of cisplatin (CDDP), carboplatin (CBDCA), and nedaplatin (CDGP). In some embodiments, the chemotherapeutic comprises docetaxel (Taxotere, DTX), paclitaxel (Taxol, PTX), albumin-bound paclitaxel (nab-paclitaxel, Abraxane), vinorelbine (Navelbine,VNR), gemcitabine (Gemzar, GEM), irinotecan (CPT-11), pemetrexed (Alimta, PEM), tegafur/gimeracil/oteracil (S1), etoposide (VP-16), or a combination thereof. In some embodiments, the chemotherapeutic therapy is a platinum-doublet regimen. In some embodiments, the chemotherapeutic therapy is a platinum-triple regimen. In some embodiments, the method comprises classifying a biological sample with respect to a plurality of states associated with NSCLC based upon one or more peptide structures provided in Table 79. In some embodiments, the method comprises inputting quantification data identified from peptide structure data for a set of peptides and/or glycopeptides into one or more machine-learning model trained to identify a risk score. In some embodiments, the method comprises classifying the subject as being likely to respond to pembrolizumab or not likely to respond to pembrolizumab based upon the risk score. In some embodiments, the peptide structure data comprises one or more peptide structure provided in Table 79. In some embodiments, the presence, absence, and/or amount of one or more peptides and/or glycopeptides is determined by MRM-MS. In some embodiments, the method comprises selecting a particular therapy described herein based upon the presence, amount, and/or relative amount of one or more biomarkers comprising the peptide structures provided in Table 79. In some embodiments, the method comprises selecting a particular therapy described herein based upon the presence, amount, and/or relative amount of one or more biomarkers comprising the glycopeptides provided in Table 79. In some embodiments, the method comprises administering a particular therapy described herein based upon the presence, amount, and/or relative amount of one or more biomarkers comprising the peptide structures provided in Table 79. In some embodiments, the method comprises administering a particular therapy described herein based upon the presence, amount, and/or relative amount of one or more biomarkers comprising the glycopeptides provided in Table 79. In some embodiments, the method further comprises selecting a particular therapy described herein based upon the disease indicator and/or classification. In some embodiments, the method further comprises administering a particular therapy described herein based upon the disease indicator and/or classification.

[1364] In some embodiments, patients are treated with a therapeutically effective amount of an immune-therapeutic. In some embodiments, the immune-therapeutic comprises an immune checkpoint inhibitor. In some embodiments, the checkpoint inhibitor comprises pembrolizumab.

[1365] In some embodiments, patients are treated with a therapeutically effective amount of a targeted therapeutic agent. In some embodiments, the targeted therapeutic agent is a drug that targets blood vessel that targets vascular endothelial growth factor (VEGF) such as bevacizumab, ramucirumab, and ziv-aflibercept. In some embodiments, the targeted therapeutic agent comprises an epidermal growth factor receptor (EGFR). In some embodiments, the EGFR comprises cetuximab or panitumumab. In some embodiments, the targeted therapeutic agent comprises a kinase inhibitor. In some embodiments, the kinase inhibitor comprises regorafenib.

[1366] In some embodiments, the targeted immunotherapy comprises one or more antibody directed towards an immune system checkpoint protein including but not limited to PD-1, PD-L1, and CTLA-4. In some embodiments, the antibody targeting PD-1 comprises nivolumab (Opdivo), pembrolizumab (Keytruda), and cemiplimab (Libtayo). In some embodiments, the antibody targeting PD-L1 comprises chemotherapy (Tecentriq), durvalumab (Imfinzi), and avelumab (Bavencio). In some embodiments, the antibody targeting CTLA-4 comprises ipilimumab (Yervoy). In some embodiments, the therapy for NSCLC comprises a combination of one or more antibody that targets PD-1, PD-L1, and CTLA-4. In some embodiments, the method comprises classifying a biological sample with respect to a plurality of states associated with NSCLC based upon one or more peptide structures provided in Table 78. In some embodiments, the method comprises classifying a biological sample with respect to a plurality of states associated with NSCLC based upon one or more glycopeptides provided in Table 78. In some embodiments, the method comprises inputting quantification data identified from peptide structure data for a set of peptides and/or glycopeptides into one or more machine-learning model trained to identify a risk score. In some embodiments, the method comprises classifying the sample as being likely to respond to pembrolizumab or not likely to respond to pembrolizumab based upon the risk indicator. In some embodiments, the peptide structure data comprises one or more peptide structure provided in Table 79. In some embodiments, the presence, absence, and/or amount of one or more peptides and/or glycopeptide is determined by MRM-MS. In some embodiments, the method comprises selecting a particular therapy described herein based upon the presence, amount, and/or relative amount of one or more biomarkers comprising the peptide structures provided in Table 78. In some embodiments, the method comprises selecting a particular therapy described herein based upon the presence, amount, and/or relative amount of one or more biomarkers comprising the glycopeptides provided in Table 79. In some embodiments, the method comprises administering a particular therapy described herein based upon the presence, amount, and/or relative amount of one or more biomarkers comprising the peptide structures provided in Table 78. In some embodiments, the method comprises administering a particular therapy described herein based upon the presence, amount, and/or relative amount of one or more biomarkers comprising the glycopeptides provided in Table 78. In some embodiments, the method further comprises selecting a particular therapy described herein based upon the risk score and/or classification. In some embodiments, the method further comprises administering a particular therapy described herein based upon the risk score and/or classification.

[1367] In some embodiments, the alternative therapy comprises one or more patient-specific therapy agent selected based on patient-specific changes in tumor cell gene expression including but not limited to changes in KRAS, EGFR, ALK, ROS1, BRAF, RET, MET, and NTRK genes. In some embodiments, the patient-specific therapy is an inhibitor of an oncogene. In some embodiments, the patient-specific therapy is an inhibitor of one or more of KRAS, EGFR, ALK, ROS1, BRAF, MEK, RET, MET, and NTRK. In some embodiments, the patient-specific therapy comprises one or more of sotorasib (Lumakras), erlotinib (Tarceva), afatinib (Gilotrif), gefitinib (Iressa), osimertinib (Tagrisso), dacomitinib (Vizimpro), amivantamab (Rybrevant), nobocertinib (Exkivity), necitumumab (Portrazza), crizotinib (Xalkori), ceritinib (Zykadia), alectinib (Alecensa), brigatinib (Alunbrig), lorlatinib (Lorbrena), entrectinib (Rozlytrek), dabrafenib (Tafinlar), trametinib (Mekinist), selpercatinib (Retevmo), pralsetinib (Gavreto), capmatinib (Tabrecta), tepotinib (Tepmetko), larotrectinib (Vitrakvi), and combinations thereof. In some embodiments the patient-specific therapy comprises an angiogenesis inhibitor. In some embodiments, the angiogenesis inhibitor comprises one of bevacizumab (Avastin, BEV) and ramucirumab (Cyramza, RAM). In some embodiments, the therapy for NSCLC comprises a combination of one or more patient-specific therapy agents. In some embodiments, the method comprises classifying a biological sample with respect to a plurality of states associated with NSCLC based upon one or more peptide structures provided in Table 78. In some embodiments, the method comprises classifying a biological sample with respect to a plurality of states associated with NSCLC based upon one or more glycopeptides provided in Table 78. In some embodiments, the method comprises inputting quantification data identified from peptide structure data for a set of peptides and/or glycopeptides into one or more machine-learning model trained to identify a disease indicator. In some embodiments, the method comprises classifying the sample as having NSCLC or not having NSCLC based upon the disease indicator. In some embodiments, the peptide structure data comprises one or more peptide structure provided in Table 78. In some embodiments, the presence, absence, and/or amount of one or more peptides and/or glycopeptide is determined by MRM-MS. In some embodiments, the method comprises selecting a particular therapy described herein based upon the presence, amount, and/or relative amount of one or more biomarkers comprising the peptide structures provided in Table 78. In some embodiments, the method comprises selecting a particular therapy described herein based upon the presence, amount, and/or relative amount of one or more biomarkers comprising the glycopeptides provided in Table 79. In some embodiments, the method comprises administering a particular therapy described herein based upon the presence, amount, and/or relative amount of one or more biomarkers comprising the peptide structures provided in Table 78. In some embodiments, the method comprises administering a particular therapy described herein based upon the presence, amount, and/or relative amount of one or more biomarkers comprising the glycopeptides provided in Table 78. In some embodiments, the method further comprises selecting a particular therapy described herein based upon the disease indicator and/or classification. In some embodiments, the method further comprises administering a particular therapy described herein based upon the disease indicator and/or classification.

[1368] In some embodiments, the radiation procedure comprises the use of high-energy rays or particles to treat NSCLC. In some embodiments, the radiation procedure comprises external beam radiation therapy (EBRT) and internal radiation therapy (also referred to as brachytherapy). In some embodiments, the EBRT comprises one or more of stereotactic ablative radiotherapy (SABR), three-dimensional conformal radiation therapy (3D-CRT), intensity modulated radiation therapy (IMRT), volumetric modulated arc therapy (VMAT), and stereotactic radiosurgery (SRS). In some embodiments, the brachytherapy comprises the placement of radioactive material in or adjacent to the tumor in the airway (e.g., bronchial tubes). In some embodiments, the method comprises classifying a biological sample with respect to a plurality of states associated with NSCLC based upon one or more peptide structures provided in Table 78. In some embodiments, the method comprises inputting quantification data identified from peptide structure data for a set of peptides and/or glycopeptides into one or more machine-learning model trained to identify a risk score. In some embodiments, the method comprises classifying the sample as being likely to respond to pembrolizumab based upon the risk score. In some embodiments, the peptide structure data comprises one or more peptide structure provided in Table 78. In some embodiments, the presence, absence, and/or amount of one or more peptides and/or glycopeptide is determined by MRM-MS. In some embodiments, the method comprises selecting a particular therapy described herein based upon the presence, amount, and/or relative amount of one or more biomarkers comprising the peptide structures provided in Table 78. In some embodiments, the method comprises selecting a particular therapy described herein based upon the presence, amount, and/or relative amount of one or more biomarkers comprising the glycopeptides provided in Table 78. In some embodiments, the method comprises administering a particular therapy described herein based upon the presence, amount, and/or relative amount of one or more biomarkers comprising the peptide structures provided in Table 78. In some embodiments, the method comprises administering a particular therapy described herein based upon the presence, amount, and/or relative amount of one or more biomarkers comprising the glycopeptides provided in Table 78. In some embodiments, the method further comprises selecting a particular therapy described herein based upon the disease indicator and/or classification. In some embodiments, the method further comprises administering a particular therapy described herein based upon the disease indicator and/or classification.

[1369] In some embodiments, pembrolizumab comprises a VH comprising the amino acid sequence of SEQ ID NO:1009 and a VL comprising the amino acid sequence of SEQ ID NO:1010. In some embodiments, pembrolizumab is administered as a first line treatment. In some embodiments, the first treatment may comprise an individual with early-stage NSCLC or NSCLC that has not metastasized. In some embodiments, the pembrolizumab is used alone when the individual with NSCLC cannot undergo surgery or chemotherapy. In some embodiments, the pembrolizumab is administered alone when the individual with NSCLC is positive for PD-L1. In some embodiments, the pembrolizumab is administered alone when the individual with NSCLC is negative for EGFR or ALK.

[1370] In some embodiments, the pembrolizumab is used in combination with a chemotherapy for treating an individual having NSCLC. In some embodiments, the pembrolizumab is administered with pemetrexed. In some embodiments, pembrolizumab is administered with pemetrexed and a platinum compound. In some embodiments, the platinum compound comprises one or more of cisplatin, carboplatin, and nedaplatin. In some embodiments, the individual having NSCLC has NSCLC that has metastasized. In some embodiments, the individual having NSCLC has nonsquamous NSCLC. In some embodiments, the individual having NSCLC does not have a mutated EGFR or ALK gene.

[1371] In some embodiments, the pembrolizumab is administered with carboplatin. In some embodiments, the pembrolizumab is administered with carboplatin and either paclitaxel or paclitaxel protein-bound. In some embodiments, the individual having NSCLC has NSCLC that has metastasized. In some embodiments, the individual having NSCLC has squamous NSCLC.

[1372] In some embodiments, the pembrolizumab is administered at a dose of about 200 mg every 3 weeks (Q3W). In some embodiments, the pembrolizumab is administered at a dose of about 400 mg Q3W. In some embodiments, the pembrolizumab is administered at a dose of about 2 mg/kg every 3 weeks (Q3W). In some embodiments, the antibody that specifically binds to PD-1 is administered, optionally as a monotherapy, in a first treatment cycle followed by combination therapy with chemotherapy. In some embodiments, the pembrolizumab is administered at a dose of about 200 mg to about 400 mg Q3W followed by combination therapy with chemotherapy. In some embodiments, the pembrolizumab is administered at a dose of at least 2 mg/kg QW or Q3W followed by combination therapy with chemotherapy. In some embodiments, the pembrolizumab is administered at a dose of about 100 mg, 200 mg, 300 mg, or 400 mg Q3W followed by combination therapy with chemotherapy. In some embodiments, the methods provided herein include treatment of the individual by administration of pembrolizumab, wherein pembrolizumab is a humanized antibody comprising a heavy chain variable region (VH) having the sequence set forth in SEQ ID NO:1009, and a light chain variable region (VL) having the sequence set forth in SEQ ID NO:1010. In some embodiments, the methods provided herein include treatment of the individual by administration of pembrolizumab, wherein the PD-1 antibody is a humanized antibody comprising a heavy chain having the sequence set forth in SEQ ID NO:1011, and a light chain having the sequence set forth in SEQ ID NO:1012. In some embodiments, a complete response (CR), partial response (PR), or stable disease (SD) is achieved following treatment. In some embodiments, the tumor size is reduced following treatment. In some embodiments, the number of lesions are reduced following treatment. In some embodiments, treatment with one or more antibody is continued until the individual is no longer responsive to therapy, is no longer willing to continue therapy, or is unable to continue therapy. In some embodiments, treatment with one or more antibody is continued for about 2 years.

TABLE 81
XIV. Pembrolizumab heavy chain and
light chain variable region amino acid
sequences

| Antibody | Variable | SEQ ID | |
|---|---|---|---|
| ID | Region | NO: | Amino Acid Sequence |
| Pembrolizumab | VH | 1009 | QVQLVQSGVEVKKPGASVK |
| | | | VSCKASGYTFTNYYMYWVR |
| | | | QAPGQGLEWMGGINPSNGG |
| | | | TNFNEKFKNRVTLTTDSST |
| | | | TTAYMELKSLQFDDTAVYY |
| | | | CARRDVHYRFDMGFDYWGQ |
| | | | GTTVTVSS |
| Pembrolizumab | VL | 1010 | EIVLTQSPATLSLSPGERA |
| | | | TLSCRASKGVSTSGYSYLH |
| | | | WYQQKPGQAPRLLIYLASY |
| | | | LESGVPARFSGSGSGTDFT |
| | | | LTISSLEPEDFAVYYCQHS |
| | | | RDLPLTFGGGTKVEIK |

TABLE 82
XV. Pembrolizumab full-length
heavy chain and light chain amino acid
sequences

| Antibody | | SEQ ID | |
|---|---|---|---|
| ID | Chain | NO: | Amino Acid Sequence |
| Pembrolizumab | Heavy | 1011 | QVQLVQSGVEVKKPGASVK |
| | chain | | VSCKASGYTFTNYYMYWVR |
| | | | QAPGQGLEWMGGINPSNGG |
| | | | TNENEKEKNRVTLTTDSST |
| | | | TTAYMELKSLQFDDTAVYY |
| | | | CARRDYRFDMGFDYWGQGT |
| | | | TVTVSSASTKGPSVFPLAP |
| | | | CSRSTSESTAALGCLVKDY |
| | | | FPEPVTVSWNSGALTSGVH |
| | | | TFPAVLQSSGLYSLSSVVT |
| | | | VPSSSLGTKTYTCNVDHKP |
| | | | SNTKVDKRVESKYGPPCPP |
| | | | CPAPEFLGGPSVFLFPPKP |
| | | | KDTLMISRTPEVTCVVVDV |
| | | | SQEDPEVQFNWYVDGVEVH |
| | | | NAKTKPREEQFNSTYRVVS |
| | | | VLTVLHQDWLNGKEYKCKV |
| | | | SNKGLPSSIEKTISKAKGQ |
| | | | PREPQVYTLPPSQEEMTKN |
| | | | QVSLTCLVKGFYPSDIAVE |
| | | | WESNGQPENNYKTTPPVLD |
| | | | SDGSFFLYSRLTVDKSRWQ |
| | | | EGNVFSCSVMHEALHNHYT |
| | | | QKSLSLSLGK |
| Pembrolizumab | Light | 1012 | EIVLTQSPATLSLSPGERA |
| | chain | | TLSCRASKGVSTSGYSYLH |
| | | | WYQQKPGQAPRLLIYLASY |
| | | | LESGVPARFSGSGSGTDFT |
| | | | LTISSLEPEDFAVYYCQHS |
| | | | RDLPLTFGGGTKVEIKRTV |
| | | | AAPSVFIFPPSDEQLKSGT |
| | | | ASVVCLLNNFYPREAKVQW |
| | | | KVDNALQSGNSQESVTEQD |
| | | | SKDSTYSLSSTLTLSKADY |
| | | | EKHKVYACEVTHQGLSSPV |
| | | | TKSFNRGEC |

[1373] In some embodiments, the antibody comprises the VH and/or the VL of antibody Pembrolizumab as shown in Table 81. In some embodiments, the antibody comprises the heavy chain and/or the light chain of antibody Pembrolizumab as shown in Table 82.

[1374] In some embodiments, the antibody that binds to PD-1 comprises a heavy chain variable domain (VHI) sequence having at least 90%, 91%, 92%, 93%, 94%, 95%, 960%, 97%, 9800, 9900, or 10000 sequence identity to the amino acid sequence of SEQ ID NO: 1009. In certain embodiments, a VH sequence contains substitutions (e.g., conservative substitutions), insertions, or deletions relative to the amino acid sequence of SEQ ID NO: 1009.

[1375] In another aspect, an antibody that binds to PD-1 is provided, wherein the antibody comprises a light chain variable domain (VL) having at least 900%, 91%, 9200, 9300 9400, 95%, 96%, 97%, 98%, 99%, or 100% sequence identity to the amino acid sequence of SEQ ID NO: 1010. In certain embodiments, a VL sequence contains substitutions (e.g., conservative substitutions), insertions, or deletions relative to the amino acid sequence of SEQ ID NO:1010.

[1376] In one embodiment, the antibody that binds to PD-1 comprises a VH comprising the amino acid sequence of SEQ ID NO:1009 and a VL comprising the amino acid sequence of SEQ ID NO:1010.

[1377] In some embodiments, an antibody that binds to PD-1 comprises a heavy chain comprising the amino acid sequence of SEQ ID NO:1011 and a light chain comprising the amino acid sequence of SEQ ID NO:1012.

[1378] In another aspect, an antibody that binds to PD-1 is provided, wherein the antibody comprises a VH as in any of the embodiments provided above, and a VL as in any of the embodiments provided above.

[1379] In some embodiments, an antibody that binds PD-1 comprising a humanized antibody. In some embodiments, the humanized antibody comprises one or more of the peptides shown in Table 81. In some embodiments, the humanized antibody comprises the amino acid sequence set forth in SEQ ID NO:1009. In some embodiments, the humanized antibody comprises the amino acid sequence set forth in SEQ ID NO:1010.

[1380] In some embodiments, the patient is treated with a targeted therapy. In some embodiments, the methods herein include administering a therapeutically effective amount of one or more of 5-fluorouracil (5-FU); capecitabine, irinotecan, oxaliplatin, trifluridine, or tipiracil.

[1381] In some embodiments the treatment administered to the subject is determined based upon the treatment output. In some embodiments, if the treatment output indicates that the subject is not likely to respond to pembrolizumab therapy, the treatment recommendation comprises an alternative therapy selected from the group consisting of standard non-checkpoint immunotherapy, standard chemotherapy, combination chemotherapy and non-checkpoint immunotherapy, targeted therapy, radiation therapy, a new generation checkpoint inhibitor alone or in combination, a LAG-3 inhibitor, a recommendation for participation in a clinical trial for an oncotherapeutic, laser therapy, photodynamic therapy, adjuvant treatment with osimertinib for subject with EGFR mutations, targeted therapy for patients with certain gene mutations such as anti-angiogenic agents, drugs that target cells with KRAS gene changes, drugs that target cells with EGFR changes, drugs that target cells with ALK gene changes, drugs that target cells with ROS1 gene changes, drugs that target cells with BRAF gene changes, chemotherapy, cisplatin, carboplatin, paclitaxel, albumin-bound paclitaxel, docetaxel, gemcitabine, vinorelbine, etoposide, pemetrexed, chemotherapy combined with radiation therapy (chemoradiation) and chemoradiation followed by durvalumab

### Machine-Learning Model

[1382] In some examples, the methods herein comprise quantifying one or more glycopeptides consisting essentially of an amino acid sequence selected from the group consisting of SEQ ID NO: 1002-1008 using mass spectrometry or tandem liquid chromatography-mass spectrometry. In some examples, the quantification results are used as inputs in a trained model. In some examples, the quantification results are classified or categorized with a predictive algorithm based on the absolute amount, relative amount, and/or type of each glycan or glycopeptide quantified in the test sample, wherein the predictive algorithm is trained on corresponding values for each marker obtained from a population of individuals having known diseases or conditions. In some examples, the disease or condition is cancer. In some cases, the disease or condition is NSCLC.

[1383] In some examples, including any of the foregoing, set forth herein is a method for training a machine-learning algorithm, comprising: providing a first data set of MRM transition signals indicative of a sample comprising a glycopeptide consisting essentially of an amino acid sequence selected from the group consisting of SEQ ID NO: 1002-1008; providing a second data set of MRM transition signals indicative of a control sample; and comparing the first data set with the second data set using a machine-learning algorithm.

[1384] In some examples, the methods herein include using a sample comprising a glycopeptide consisting of an amino acid sequence selected from the group consisting of SEQ ID NO: 1002-1008 is a sample from a patient having the disease or condition. In some examples, the methods herein include using a sample comprising a glycopeptide consisting essentially of an amino acid sequence selected from the group consisting of SEQ ID NO: 1002-1008 is a sample from a patient having cancer. In some examples, the methods herein include using a control sample, wherein the control sample is a sample from a patient not having the disease or condition.

[1385] In some examples, the methods herein include using a sample comprising a glycopeptide consisting essentially of an amino acid sequence selected from the group consisting of SEQ ID NO: 1002-1008, which is a pooled sample from one or more patients having the disease or condition. In some examples, the methods herein include using a control sample, which is a pooled sample from one or more patients not having the disease or condition.

[1386] In some examples, the methods include generating machine-learning models trained using mass spectrometry data (e.g., MRM-MS transition signals) from patients having a disease or condition and patients not having a disease or condition. In some examples, the disease or condition is cancer. In some examples, the methods include optimizing the machine-learning models by cross-validation with known standards or other samples. In some examples, the methods include qualifying the performance using the mass spectrometry data to form panels of glycans and glycopeptides with individual sensitivities and specificities. In certain examples, the methods include determining a confidence percent in relation to a diagnosis. In some examples, one to ten glycopeptides consisting essentially of an amino acid sequence selected from the group consisting of SEQ ID NO: 1002-1008 may be useful for diagnosing a patient with the disease or condition with a certain confidence percent. In some examples, ten to fifty glycopeptides consisting essentially of an amino acid sequence selected from the group consisting of SEQ ID NO: 1002-1008 may be useful for diagnosing a patient with the disease or condition with a higher confidence percent.

[1387] In some examples, including any of the foregoing, the methods include performing MRM-MS and/or LC-MS on a biological sample. In some examples, the methods include constructing, by a computing device, theoretical mass spectra data representing a plurality of mass spectra, wherein each of the plurality of mass spectra corresponds to one or more glycopeptides consisting essentially of an amino acid sequence selected from the group consisting of SEQ ID NO: 1002-1008. In some examples, the methods include comparing, by the computing device, the mass spectra data with the theoretical mass spectra data to generate comparison data indicative of a similarity of each of the plurality of mass spectra to each of the plurality of theoretical target mass spectra associated with a corresponding glycopeptide of the plurality of glycopeptides.

[1388] In some examples, machine-learning algorithms are used to determine, by the computing device and based on the MRM-MS data, a distribution of a plurality of characteristic ions in the plurality of mass spectra; and determining, by the computing device and based on the distribution, whether one or more of the plurality of characteristic ions is a glycopeptide ion.

[1389] In some examples, the methods herein include training a predictive algorithm. Herein, training the predictive algorithm may refer to supervised learning of a predictive algorithm on the basis of values for one or more glycopeptides consisting of, or consisting essentially of, an amino acid sequence selected from the group consisting of SEQ ID NO: 1002-1008. Training the predictive algorithm may refer to variable selection in a statistical model on the basis of values for one or more glycopeptides consisting essentially of an amino acid sequence selected from the group consisting of SEQ ID NO: 1002-1008. Training a predictive algorithm may for example include determining a weighting vector in feature space for each category, or determining a function or function parameters.

[1390] In some examples, the machine-learning algorithm is selected from the group consisting of a deep learning algorithm, a neural network algorithm, an artificial neural network algorithm, a supervised machine-learning algorithm, a linear discriminant analysis algorithm, a quadratic discriminant analysis algorithm, a support vector machine algorithm, a linear basis function kernel support vector algorithm, a radial basis function kernel support vector algorithm, a random forest algorithm, a genetic algorithm, a nearest neighbor algorithm, k-nearest neighbors, a naive Bayes classifier algorithm, a logistic regression algorithm, or a combination thereof. In certain examples, the machine-learning algorithm is generalized additive model regression.

[1391] In some examples, the machine-learning algorithm is generalized additive model, LASSO, Ridge Regression, Random Forests, K-nearest Neighbors (KNN), Deep Neural Networks (DNN), and Principal Components Analysis (PCA). In certain examples, DNN's are used to process mass spec data into analysis-ready forms. In some examples, DNN's are used for peak picking from a mass spectra. In some examples, PCA is useful in feature detection.

[1392] In some examples, LASSO is used to provide feature selection. In some examples, elastic net regression is used to provide feature selection.

[1393] In some examples, machine-learning algorithms are used to quantify peptides from each protein that are representative of the protein abundance. In some examples, this quantification includes quantifying proteins for which glycosylation is not measured.

[1394] In some examples, glycopeptide sequences are identified by fragmentation in the mass spectrometer and database search using Byonic software (Protein Metrics Inc).

[1395] In some examples, the methods herein include unsupervised learning to detect features of MRM-MS data that represent known biological quantities, such as protein function or glycan motifs. In certain examples, these features are used as input for classifying by machine-learning. In some examples, the classification is performed using generalized additive models, LASSO, Ridge Regression, or Random Forest nature.

[1396] In some examples, the methods herein include mapping input data (e.g., MRM transition peaks) to a value (e.g., a scale based on 0-100) before processing the value in an algorithm. For example, after an MRM transition is identified and the peak characterized, the methods herein include assessing the MS scans in an m/z and retention time window around the peak for a given patient. In some examples, the resulting chromatogram is integrated by a machine-learning algorithm that determines the peak start and stop points, and calculates the area bounded by those points and the intensity (height). The resulting integrated value is the abundance, which then feeds into machine-learning and statistical analyses training and data sets. In some examples, a concentration is calculated from the abundance, which then feeds into machine-learning and statistical analyses training and data sets.

[1397] In some examples, machine-learning output, in one instance, is used as machine-learning input in another instance. For example, in addition to the PCA being used for a classification process, the DNN data processing feeds into PCA and other analyses. This results in at least three levels of algorithmic processing. Other hierarchical structures are contemplated within the scope of the instant disclosure.

[1398] In some examples, the methods include comparing the amount of each glycan or glycopeptide quantified in the sample to corresponding reference values for each glycan or glycopeptide in a predictive algorithm. In some examples, the methods include a comparative process by which the amount of a glycan or glycopeptide quantified in the sample is compared to a reference value for the same glycan or glycopeptide using a predictive algorithm. The comparative process may be part of a classification by a predictive algorithm. The comparative process may occur at an abstract level, e.g., in n-dimensional feature space or in a higher dimensional space.

[1399] In some examples, the methods herein include classifying a patient's sample based on the amount of each glycan or glycopeptide quantified in the sample with a predictive algorithm. In some examples, the methods include using statistical or machine-learning classification processes by which the amount of a glycan or glycopeptide quantified in the test sample is used to determine a category of health with a predictive algorithm. In some examples, the predictive algorithm is a statistical or machine-learning classification algorithm.

[1400] In some examples, classification by a predictive algorithm may include scoring likelihood of a panel of glycan or glycopeptide values belonging to each possible category, and determining the highest-scoring category. Classification by a predictive algorithm may include comparing a panel of marker values to previous observations by means of a distance function. Examples of predictive algorithms suitable for classification include generalized additive models, random forests, support vector machines, logistic regression (e.g. multiclass or multinomial logistic regression, and/or algorithms adapted for sparse logistic regression). A wide variety of other predictive algorithms that are suitable for classification may be used, as known to a person skilled in the art.

[1401] In some examples, the methods herein include supervised learning of a predictive algorithm on the basis of values for each glycan or glycopeptide obtained from a population of individuals having a disease or condition (e.g., NSCLC). In some examples, the methods include variable selection in a statistical model on the basis of values for each glycan or glycopeptide obtained from a population of individuals having the disease or condition. Training a predictive algorithm may for example include determining a weighting vector in feature space for each category, or determining a function or function parameters.

[1402] In one embodiment, the reference value is the amount of a glycan or glycopeptide in a sample or samples derived from one individual. Alternatively, the reference value may be derived by pooling data obtained from multiple individuals, and calculating an average (for example, mean or median) amount for a glycan or glycopeptide. Thus, the reference value may reflect the average amount of a glycan or glycopeptide in multiple individuals. Said amounts may be expressed in absolute or relative terms, in the same manner as described herein.

[1403] In some examples, the reference value may be derived from the same sample as the sample that is being tested, thus allowing for an appropriate comparison between the two. For example, if the sample is derived from urine, the reference value is also derived from urine. In some examples, if the sample is a blood sample (e.g. a plasma or a serum sample), then the reference value will also be a blood sample (e.g. a plasma sample or a serum sample, as appropriate). When comparing between the sample and the reference value, the way in which the amounts are expressed is matched between the sample and the reference value. Thus, an absolute amount can be compared with an absolute amount, and a relative amount can be compared with a relative amount. Similarly, the way in which the amounts are expressed for classification with the predictive algorithm is matched to the way in which the amounts are expressed for training the predictive algorithm.

[1404] When the amounts of the glycan or glycopeptide are determined, the method may comprise comparing the amount of each glycan or glycopeptide to its corresponding reference value. When the cumulative amount of one, some or all the glycan or glycopeptides are determined, the method may comprise comparing the cumulative amount to a corresponding reference value. When the amounts of the glycan or glycopeptides are combined with each other in a formula to form an index value, the index value can be compared to a corresponding reference index value derived in the same manner.

[1405] The reference values may be obtained either within (i.e., constituting a step of) or external to the (i.e., not constituting a step of) methods described herein. In some examples, the methods include a step of establishing a reference value for the quantity of the markers. In other examples, the reference values are obtained externally to the method described herein and accessed during the comparison step of the invention.

[1406] In certain embodiments, the generalized additive model may be a regression model or other classification model that may be evaluated utilizing receiver operating characteristic (ROC) evaluation and/or area under curve (AOC) evaluation. For example, in certain embodiments, the ROC model evaluation may represent a plot of sensitivity rate (e.g., patient likely not responsive) against a plot of specificity rate (patient likely to be responsive) and may be further optimized based on an iterative tuning of hyperparameters of the generalized additive model. The trained generalized additive model may be then utilized to predict patient overall survival (OS) for various glycopeptide fragments, in accordance with the presently disclosed embodiments.

[1407] In some examples, including any of the foregoing, training of a predictive algorithm may be obtained either within (i.e., constituting a step of) or external to (i.e., not constituting a step of) the methods set forth herein. In some examples, the methods include a step of training of a predictive algorithm. In some examples, the predictive algorithm is trained externally to the method herein and accessed during the classification step of the invention. The reference value may be determined by quantifying the amount of a glycan or glycopeptide in a sample obtained from a population of healthy individual(s). The predictive algorithm may be trained by quantifying the amount of a glycan or glycopeptide in a sample obtained from a population of healthy individual(s). As used herein, the term “healthy individual” refers to an individual or group of individuals who are in a healthy state, e.g., patients who have not shown any symptoms of the disease, have not been diagnosed with the disease and/or are not likely to develop the disease. Preferably said healthy individual(s) is not on medication affecting the disease and has not been diagnosed with any other disease. The one or more healthy individuals may have a similar sex, age and body mass index (BMI) as compared with the test individual. The reference value may be determined by quantifying the amount of a glycan or glycopeptide in a sample obtained from a population of individual(s) suffering from the disease. The predictive algorithm may be trained by quantifying the amount of a marker in a sample obtained from a population of individual(s) suffering from the disease. More preferably such individual(s) may have similar sex, age and body mass index (BMI) as compared with the test individual. The reference value may be obtained from a population of individuals suffering from cancer. The predictive algorithm may be trained by quantifying the amount of a glycan or glycopeptide in a sample obtained from a population of individuals having NSCLC who have been treated with pembrolizumab therapy or combination pembrolizumab and chemotherapy. Once the characteristic glycan or glycopeptide profile of individuals responsive to pembrolizumab therapy is determined, the profile of markers from a biological sample obtained from an individual with NSCLC may be compared to this reference profile to determine whether the test subject will also be responsive to pembrolizumab therapy. Once the predictive algorithm is trained to classify those individuals responsive to pembrolizumab therapy, the profile of markers from a biological sample obtained from an individual diagnosed with NSCLC may be classified by the predictive algorithm to determine whether the test subject is also likely responsive to pembrolizumab therapy.

### Kits

[1408] In some examples, including any of the foregoing, set forth herein is a kit comprising a glycopeptide standard, a buffer, and one or more glycopeptides consisting of an amino acid sequence selected from the group consisting of SEQ ID NO: 1002-1008.

[1409] In some examples, including any of the foregoing, set forth herein is a kit comprising a glycopeptide standard, a buffer, and one or more glycopeptides consisting essentially of an amino acid sequence selected from the group consisting of SEQ ID NO: 1002-1008.

[1410] In some examples, set forth herein is a kit comprising a glycopeptide standard, a buffer, and one or more glycopeptides consisting of an amino acid sequence selected from the group consisting of SEQ ID NO: 1002-1008, and combinations thereof. In some examples, set forth herein is a kit comprising a glycopeptide standard, a buffer, and one or more glycopeptides consisting essentially of an amino acid sequence selected from the group consisting of SEQ ID NO: 1002-1008.

[1411] In some examples, set forth herein is a kit for diagnosing or monitoring cancer in an individual wherein the glycan or glycopeptide profile of a sample from said individual is determined and the measured profile is compared with a profile of a normal patient or a profile of a patient with a family history of cancer. In some examples, the kit comprises one or more glycopeptides consisting of an amino acid sequence selected from the group consisting SEQ ID NO: 1002-1008. In some examples, the kit comprises one or more glycopeptides consisting essentially of an amino acid sequence selected from the group consisting of SEQ ID NO: 1002-1008.

[1412] In some examples, set forth herein is a kit comprising the reagents for quantification of the oxidized, nitrated, and/or glycated free adducts derived from glycopeptides.

### Compositions

[1413] Also provided herein are compositions comprising the glycoproteins, glycopeptides, and peptides provided herein. In some embodiments, provided herein is a composition comprising one or more different peptide structures, two or more different peptide structures, three or more different peptide structures, four or different more peptide structures, five or different more peptide structures, six different peptide structures, or all seven peptide structures comprising the sequences set forth in SEQ ID NO:6-12

### Clinical Assays

[1414] In some examples, the biomarkers, methods, and/or kits may be used in a clinical setting for diagnosing patients. In some of these examples, the analysis of samples includes the use of internal standards. These standards may include one or more glycopeptides consisting of an amino acid sequence selected from the group consisting of SEQ ID NO: 1002-1008. These standards may include one or more glycopeptides consisting essentially of an amino acid sequence selected from the group consisting of SEQ ID NO: 1002-1008.

[1415] In a clinical setting, samples may be prepared (e.g., by digestion) to include one or more glycopeptides consisting of an amino acid sequence selected from the group consisting of SEQ ID NO: 1002-1008. In a clinical setting, samples may be prepared (e.g., by digestion) to include one or more glycopeptides consisting essentially of an amino acid sequence selected from the group consisting of SEQ ID NO: 1002-1008. In some examples, the amount of a glycan or glycopeptide may be assessed by comparing the amount of one or more glycopeptides consisting of an amino acid sequence selected from the group consisting of SEQ ID NO: 1002-1008 to the concentration of another biomarker. In some examples, the amount of a glycan or glycopeptide may be assessed by comparing the amount of one or more glycopeptides consisting essentially of an amino acid sequence selected from the group consisting of SEQ ID NO: 1002-1008 to the concentration of another biomarker.

[1416] In some examples, the amount of a glycan or glycopeptide may be assessed by comparing the amount of one or more glycopeptides consisting of an amino acid sequence selected from the group consisting of SEQ ID NO: 1002-1008 to the amount of one or more glycopeptides consisting of an amino acid sequence selected from the group consisting of SEQ ID NO: 1002-1008.

[1417] In some examples, the amount of a glycan or glycopeptide may be assessed by comparing the amount of one or more glycopeptides consisting essentially of an amino acid sequence selected from the group consisting of SEQ ID NO: 1002-1008 to the amount of one or more glycopeptides consisting essentially of an amino acid sequence selected from the group consisting of SEQ ID NO: 1002-1008.

[1418] In some examples, including any of the foregoing, the kit may include software for computing the normalization of a glycopeptide MRM transition signal.

[1419] In some examples, including any of the foregoing, the kit may include software for quantifying the amount of a glycopeptide consisting of, or consisting essentially of, an amino acid sequence selected from the group consisting of SEQ ID NO: 1002-1008. In some examples, including any of the foregoing, the kit may include software for quantifying the relative amount of a glycopeptide consisting of, or consisting essentially of, an amino acid sequence selected from the group consisting of SEQ ID NO: 1002-1008.

[1420] In some examples, including any of the foregoing, a trained model is stored on a server which is accessed by a clinician performing a method, set forth herein. In some examples, the clinician inputs the quantification of the MRM transition signals from a patient's sample into a trained model which are stored on a server. In some examples, the server is accessed by the internet, wireless communication, or other digital or telecommunication methods.

[1421] In some examples, including any of the foregoing, a trained model is stored on a server which is accessed by a clinician performing a method, set forth herein. In some examples, the clinician inputs the quantification of the glycopeptide or glycopeptides consisting of, or consisting essentially of, an amino acid sequence selected from the group consisting of SEQ ID NO: 1002-1008 from a patient's sample into a trained model which are stored on a server. In some examples, the server is accessed by the internet, wireless communication, or other digital or telecommunication

[1422] Individual KM curves may be plotted for the markers relevant in for the disease interest in four files. Hazard ratios and p-values on the plots are representative of the plotted high/low split at median biomarker expression. FIGS. 147A and 147B show overall survival (OS) Kaplan-Meier curves of patients with non-small-cell lung cancer (NSCLC) for various glycopeptide fragments.

[1423] In the descriptions herein, it is understood that every description, variation, embodiment or aspect of a biomarker, peptide, glycopeptide, glycoprotein may be combined with every description, variation, embodiment or aspect of other biomarkers, peptides, glycopeptide, glycoproteins the same as if each and every combination of descriptions is specifically and individually listed.

### II. Additional Considerations

[1424] Any headers and/or sub-headers between sections and subsections of this document are included solely for the purpose of improving readability and do not imply that features cannot be combined across sections and subsection. Accordingly, sections and subsections do not describe separate embodiments.

[1425] While the present teachings are described in conjunction with various embodiments, it is not intended that the present teachings be limited to such embodiments. On the contrary, the present teachings encompass various alternatives, modifications, and equivalents, as will be appreciated by those of skill in the art. The present description provides preferred exemplary embodiments, and is not intended to limit the scope, applicability or configuration of the disclosure. Rather, the present description of the preferred exemplary embodiments will provide those skilled in the art with an enabling description for implementing various embodiments.

[1426] It is understood that various changes may be made in the function and arrangement of elements without departing from the spirit and scope as set forth in the appended claims. Thus, such modifications and variations are considered to be within the scope set forth in the appended claims. Further, the terms and expressions which have been employed are used as terms of description and not of limitation, and there is no intention in the use of such terms and expressions of excluding any equivalents of the features shown and described or portions thereof, but it is recognized that various modifications are possible within the scope of the invention claimed.

[1427] In describing the various embodiments, the specification may have presented a method and/or process as a particular sequence of steps. However, to the extent that the method or process does not rely on the particular order of steps set forth herein, the method or process should not be limited to the particular sequence of steps described, and one skilled in the art can readily appreciate that the sequences may be varied and still remain within the spirit and scope of the various embodiments.

[1428] Some embodiments of the present disclosure include a system including one or more data processors. In some embodiments, the system includes a non-transitory computer readable storage medium containing instructions which, when executed on the one or more data processors, cause the one or more data processors to perform part or all of one or more methods and/or part or all of one or more processes disclosed herein. Some embodiments of the present disclosure include a computer-program product tangibly embodied in a non-transitory machine-readable storage medium, including instructions configured to cause one or more data processors to perform part or all of one or more methods and/or part or all of one or more processes disclosed herein.

[1429] Specific details are given in the present description to provide an understanding of the embodiments. However, it is understood that the embodiments may be practiced without these specific details. For example, circuits, systems, networks, processes, and other components may be shown as components in block diagram form in order not to obscure the embodiments in unnecessary detail. In other instances, well-known circuits, processes, algorithms, structures, and techniques may be shown without unnecessary detail in order to avoid obscuring the embodiments.

### XV. EXAMPLES

[1430] The following examples are included to demonstrate particular embodiments of the disclosure. It should be appreciated by those of skill in the art that the techniques disclosed in the examples that follow represent techniques discovered by the inventors to function well in the practice of the embodiments of the disclosure, and thus can be considered to constitute particular modes for its practice. However, those of skill in the art should, in light of the present disclosure, appreciate that many changes can be made in the various embodiments that are disclosed and still obtain a like or similar result without departing from the spirit and scope of the disclosure.

### Example 1

### Serum Glycoprotein Markers for Predicting Stages of Fibrosis in Non-Alcoholic Steatohepatitis

[1431] Examples of methods and results are provided that are related to identification of glycoprotein markers in the serum of individuals that allow prediction of different stages of fibrosis in non-alcoholic steatohepatitis (NASH). Serum from 142 healthy controls (76—female, 66—male) were obtained from a commercial provider. Serum from 109 NASH patients (20 biological female, 88 biological male, and 1 biological sex unknown) was obtained from two different commercial providers. NASH fibrosis staging among the individuals with NASH was as follows: F1-38 individuals, F2-17 individuals, F3-42 individuals, F4-4 individuals. Commercially obtained serum reference samples were run alongside patient samples. Samples were processed for analysis using a proprietary method of the Applicant. Processed samples were analyzed on a Triple Quadrupole (QQQ) that was operated in dynamic Multiple reaction monitoring (MRM) mode. The inventors used PB-net, a peak picking software built in-house, to quantify area under the peaks. The python statistical library Scikit-learn was used for all statistical analyses.

[1432] In the study, the inventors sought to distinguish serum from NASH patients from control and to distinguish NASH—early (F1&F2) and NASH—late (F3&F4). MRM analysis was performed on control- and NASH-serum. The transition list consisted of glycopeptides and non-glycosylated peptides from proteins that are commonly implicated in various diseases. Prognostic markers were sought with abundance levels significantly different between control and NASH and significantly different between early and late stages of NASH. There were at least 48 glycopeptide and peptide markers that met the aforementioned significance criteria and that also showed the same direction of change in control vs NASH and NASH (early) vs NASH (late). For building the models a 70:30 split was used between train: test set. In a specific embodiment, 14 out these 48 were utilized to train the models. The logistic regression classifier for control vs NASH achieved a test set accuracy of 96% and test AUC of 0.96 (FIG. 12). When a logistic regression binary classifier model was developed of NASH—early (F1&F2) vs NASH —late (F3&F4), a test set accuracy of about 77% and test AUC of 0.83 was achieved (FIG. 11).

### Example 2

### Predicting Breast Cancer in Women Using Liquid Biopsy Derived Glycoproteomic Markers

[1433] Examples of methods and results are provided that are related to identification of glycoprotein markers in the peripheral blood of individuals that allow prediction or identification for the presence of breast cancer.

[1434] Serum samples from 279 breast cancer patients (median age 56 years) at various stages acquired from Bay Biosciences and iSpecimen and 102 healthy control samples (median age 52 years) acquired from Precision for Medicine. A panel of 596 serum glycosylated and non-glycosylated peptides, representing 71 serum proteins, were analyzed. Age-adjusted differential expression analysis for 596 normalized biomarkers were performed to evaluate statistically significant differential abundances using an FDR-adjusted q-value of 0.05 as a cutoff. Using the top 243 differentially expressed markers as input, a LASSO penalized logistic regression model with 5-fold repeated cross validation was applied to identify the top biomarkers contributing to the separation between healthy controls and breast cancer patients.

[1435] Similarly, another model was built with the same steps as above except in this model only stage 1 (n=83) and stage 2 (n=111) samples were included along with 102 healthy control samples to assess the performance of our platform in early-stage breast cancer detection.

### Example 3

### Glycoproteomic Biomarkers in Samples for Pancreatic Cancer Screening

[1436] Examples of methods and results are provided that are related to identification of glycoprotein markers in the peripheral blood of individuals that allow prediction or identification for the presence of pancreatic cancer. Peripheral blood from 194 healthy controls were obtained from a commercial provider. In Model 1, peripheral blood from 290 pancreatic cancer patients was obtained from two different commercial providers. In Model 2, peripheral blood from 308 pancreatic cancer patients was obtained from two commercial providers and an academic institution. In Model 3, peripheral blood from 205 early stage pancreatic cancer patients was obtained from two commercial providers and an academic institution. Commercially obtained reference samples were run alongside patient samples, and the reference samples included healthy controls (Model 1), healthy controls and benign pancreatitis patients (Model 2), and healthy controls and benign pancreatitis patients (Model 3). Samples were processed for analysis using a proprietary method of the Applicant. Processed samples were analyzed on a Triple Quadrupole (QQQ) that was operated in dynamic Multiple reaction monitoring (MRM) mode. The R programming language was used to perform statistical analyses and generate visualizations, and the R package ‘caret’ was used for ML modeling procedures.

[1437] In the study, the inventors sought to distinguish peripheral blood from individuals from control and individuals with pancreatic cancer. MRM analysis was performed on control- and pancreatic cancer peripheral blood. The transition list comprised glycopeptides and non-glycosylated peptides from proteins that are commonly implicated in various diseases. Prognostic markers were sought with abundance levels significantly different between control and pancreatic cancer and, for Model 3, significantly different between control and early stage pancreatic cancer. There were at least 55 glycopeptide and peptide markers that met the aforementioned significance criteria and that also showed the same direction of change in control vs. pancreatic cancer (or early stage pancreatic cancer). For building the models, a 70:30 split was used between train: test set. In a specific embodiment, 22, 19, or 17 out these 55 were utilized to train the respective Models 1, 2, and 3. For a logistic regression binary classifier model developed of healthy vs. pancreatic cancer patients (Model 1), a test set accuracy of about 0.971 and test AUC of 0.988 was achieved. For a logistic regression binary classifier model developed of healthy+benign vs. pancreatic cancer patients (Model 2), a test set accuracy of about 0.863 and test AUC of 0.892 was achieved. For a logistic regression binary classifier model developed of healthy+benign vs. early-stage pancreatic cancer patients (Model 3), a test set accuracy of about 0.825 and test AUC of 0.873 was achieved.

### Example 4. Sample Preparation and MS Data Production for Training a Diagnostic Model

[1438] A schematic for the overall workflow for sample preparation and analysis is given in FIG. 39, in which the data interpretation process as illustrated by Step 6 may include performing one or more machine-learning model based prediction and/or classification tasks utilizing a regularized regression model (e.g., LASSO regression model) as described herein. In this workflow, 694 glycopeptide (GP) and non-glycosylated peptide transitions were interrogated, which were derived from 74 serum proteins in pre-treatment peripheral blood samples from a cohort of 194 healthy individuals and a cohort of 316 individuals with NSCLC, as shown in Table 33.

[1439] Individuals were assessed prior to sample analysis, using clinical criteria for the NSCLC diagnosis and staging. Lung biopsy samples were subject to a histopathological assessment and clinical imaging techniques were used to stage individuals having NSCLC. The stage of the NSCLC was assigned using the TNM system that is based on the size and extent of the main tumor (T), the spread to nearby lymph nodes (N), and the spread (metastasis) to distant sites (M).

TABLE 33
Summary of patient age and sex

| | No. of | Age | Median | | | Cancer |
|---|---|---|---|---|---|---|
| Status | individuals | range | Age | Female | Male | Stage (0-4) |
| Healthy | 194 | 30-63 | 52 | 102 | 92 | N/A |
| NSCLC | 316 | 31-89 | 66 | 128 | 187 | 1/99/80/84/49 |

*For NSCLC cohort: 1 individual with unknown sex, and 3 individuals with unknown cancer stage.

[1440] Pooled human serum for assay normalization and calibration purposes, dithiothreitol (DTT), and iodoacetamide (IAA) were purchased from Millipore Sigma (St. Louis, MO). Sequencing grade trypsin was purchased from Promega (Madison, WI). Acetonitrile (LC-MS grade) was purchased from Honeywell (Muskegon, MI). All other reagents used were procured from Millipore Sigma, VWR, and Fisher Scientific.

[1441] Prior to analysis, plasma samples were reduced with DTT in a water bath at 60° C. for 50 min, then alkylated with IAA followed by digestion with trypsin in a water bath at 37° C. for 18 hours. To quench the digestion, formic acid was added to each sample after incubation to a final concentration of 1% (v/v). A pool of 18 stable isotope-labeled synthetic peptides matching the sequence of 18 endogenous peptide targets were included at a known concentration for the purpose of determining absolute endogenous protein concentrations in the samples.

[1442] Digested plasma samples were injected into an Agilent 6495B triple quadrupole mass spectrometer equipped with an Agilent 1290 Infinity ultra-high-pressure (UHP)—LC system and an Agilent ZORBAX Eclipse Plus C18 column (2.1 mm×150 mm i.d., 1.8 μm particle size). Separation of the peptides and glycopeptides was performed using a 49-min binary gradient. The aqueous mobile phase A was 3% acetonitrile, 0.1% formic acid in water (v/v), and the organic mobile phase B was 90% acetonitrile, 0.1% formic acid in water (v/v). The flow rate was set at 0.5 mL/min. Electrospray ionization (ESI) was used as the ionization source and was operated in positive ion mode. The triple quadrupole MS was operated in dynamic multiple reaction monitoring (dMRM) mode. Samples were injected in a randomized fashion with regard to underlying phenotype, and reference pooled serum digests were injected interspersed with study samples, at every 10^{th} sample position throughout the run. The R library ‘caret’ was used for building machine-learning models, and all other statistical analyses used base R functions.

[1443] Concentration of peptides and glycopeptides were calculated by the following formula:

$$[ peptide ] = \frac{peptide raw abundance}{ISTD raw abundance} \times [ ISTD ] \times dilution factor$$

[1444] Wherein the internal standard (ISTD) corresponds to the peptide of interest, optionally as a stable isotope internal standard (e.g., heavy labeled lysine). An example ISTD could be GWVTDGFSSLK* where the terminal lysine is a heavy stable isotope labeled lysine for the unlabeled peptide with sequence—GWVTDGFSSLK.

$$glycopeptide site occupancy = \frac{glycopeptide raw abundance}{glycoprotein raw abundance}$$

[1445] Wherein the glycoprotein raw abundance is the raw abundance sum of all of the glycopeptides from the same glycoprotein.

$${[ glycopeptide ]}_{approximate} = glycopeptide site occupancy \times {[ peptide ]}_{glycopeptide}$$

[1446] Wherein the [peptide] is the peptide concentration of the quantification peptide from the same glycoprotein.

### Example 5. Analysis of Peptide Structure Data

[1447] A MRM-MS analysis was performed on pre-treatment peripheral blood samples from healthy individuals and individuals having NSCLC, wherein digested and processed samples containing one or more of peptide and glycopeptide were subjected to LC-MS/MS running in a MRM mode to quantify the presence, amount, and/or structure of the one or more peptides and glycopeptide. Concentrations of glycopeptides and peptides were calculated as described in Example 4. Provided in Table 35 are the identified peptide sequences and glycan moieties that were determined to have significantly different concentrations for peptides and glycopeptides when comparing the healthy cohort vs the NSCLC cohort. In Tables 36A and 36B, the glycan structures referenced in Table 35 are shown. The proteins and glycoproteins associated with these peptides and glycopeptides, respectively, are summarized in Table 34. In Table 37, the MRM-MS and liquid chromatography (LC) parameters for the peptide and glycopeptide identification are summarized.

TABLE 34
Proteins and glycoproteins associated with NSCLC control, all stages of
NSCLC, early-stage NSCLC, and late-stage NSCLC

| SEQ | Protein | | | |
|---|---|---|---|---|
| ID | Abbre- | | UniProt | |
| NO | viation | Protein Name | ID | Protein Sequence |
| SEQ | A2GL | Leucine-rich | P02750 | MSSWSRQRPKSPGGIQPHVSRTLFLLLLLAASAWGVT |
| ID | | alpha-2- | | LSPKDCQVFRSDHGSSISCQPPAEIPGYLPADTVHLAV |
| NO: | | glycoprotein | | EFFNLTHLPANLLQGASKLQELHLSSNGLESLSPEFLR |
| 197 | | | | PVPQLRVLDLTRNALTGLPPGLFQASATLDTLVLKEN |
| | | | | QLEVLEVSWLHGLKALGHLDLSGNRLRKLPPGLLAN |
| | | | | FTLLRTLDLGENQLETLPPDLLRGPLQLERLHLEGNKL |
| | | | | QVLGKDLLLPQPDLRYLFLNGNKLARVAAGAFQGLR |
| | | | | QLDMLDLSNNSLASVPEGLWASLGQPNWDMRDGFDI |
| | | | | SGNPWICDQNLSDLYRWLQAQKDKMFSQNDTRCAG |
| | | | | PEAVKGQTLLAVAKSQ |
| SEQ | A2MG | Alpha-2- | P01023 | MGKNKLLHPSLVLLLLVLLPTDASVSGKPQYMVLVPS |
| ID | | macroglobulin | | LLHTETTEKGCVLLSYLNETVTVSASLESVRGNRSLFT |
| NO: | | | | DLEAENDVLHCVAFAVPKSSSNEEVMFLTVQVKGPT |
| 198 | | | | QEFKKRTTVMVKNEDSLVFVQTDKSIYKPGQTVKFR |
| | | | | VVSMDENFHPLNELIPLVYIQDPKGNRIAQWQSFQLE |
| | | | | GGLKQFSFPLSSEPFQGSYKVVVQKKSGGRTEHPFTV |
| | | | | EEFVLPKFEVQVTVPKIITILEEEMNVSVCGLYTYGKP |
| | | | | VPGHVTVSICRKYSDASDCHGEDSQAFCEKFSGQLNS |
| | | | | HGCFYQQVKTKVFQLKRKEYEMKLHTEAQIQEEGTV |
| | | | | VELTGRQSSEITRTITKLSFVKVDSHFRQGIPFFGQVRL |
| | | | | VDGKGVPIPNKVIFIRGNEANYYSNATTDEHGLVQFSI |
| | | | | NTTNVMGTSLTVRVNYKDRSPCYGYQWVSEEHEEA |
| | | | | HHTAYLVFSPSKSFVHLEPMSHELPCGHTQTVQAHYI |
| | | | | LNGGTLLGLKKLSFYYLIMAKGGIVRTGTHGLLVKQE |
| | | | | DMKGHFSISIPVKSDIAPVARLLIYAVLPTGDVIGDSA |
| | | | | KYDVENCLANKVDLSFSPSQSLPASHAHLRVTAAPQS |
| | | | | VCALRAVDQSVLLMKPDAELSASSVYNLLPEKDLTGF |
| | | | | PGPLNDQDNEDCINRHNVYINGITYTPVSSTNEKDMY |
| | | | | SFLEDMGLKAFTNSKIRKPKMCPQLQQYEMHGPEGL |
| | | | | RVGFYESDVMGRGHARLVHVEEPHTETVRKYFPETW |
| | | | | IWDLVVVNSAGVAEVGVTVPDTITEWKAGAFCLSED |
| | | | | AGLGISSTASLRAFQPFFVELTMPYSVIRGEAFTLKAT |
| | | | | VLNYLPKCIRVSVQLEASPAFLAVPVEKEQAPHCICAN |
| | | | | GRQTVSWAVTPKSLGNVNFTVSAEALESQELCGTEVP |
| | | | | SVPEHGRKDTVIKPLLVEPEGLEKETTFNSLLCPSGGE |
| | | | | VSEELSLKLPPNVVEESARASVSVLGDILGSAMQNTQ |
| | | | | NLLQMPYGCGEQNMVLFAPNIYVLDYLNETQQLTPEI |
| | | | | KSKAIGYLNTGYQRQLNYKHYDGSYSTFGERYGRNQ |
| | | | | GNTWLTAFVLKTFAQARAYIFIDEAHITQALIWLSQR |
| | | | | QKDNGCFRSSGSLLNNAIKGGVEDEVTLSAYITIALLE |
| | | | | IPLTVTHPVVRNALFCLESAWKTAQEGDHGSHVYTK |
| | | | | ALLAYAFALAGNQDKRKEVLKSLNEEAVKKDNSVH |
| | | | | WERPQKPKAPVGHFYEPQAPSAEVEMTSYVLLAYLT |
| | | | | AQPAPTSEDLTSATNIVKWITKQQNAQGGFSSTQDTV |
| | | | | VALHALSKYGAATFTRTGKAAQVTIQSSGTFSSKFQV |
| | | | | DNNNRLLLQQVSLPELPGEYSMKVTGEGCVYLQTSL |
| | | | | KYNILPEKEEFPFALGVQTLPQTCDEPKAHTSFQISLSV |
| | | | | SYTGSRSASNMAIVDVKMVSGFIPLKPTVKMLERSNH |
| | | | | VSRTEVSSNHVLIYLDKVSNQTLSLFFTVLQDVPVRDL |
| | | | | KPAIVKVYDYYETDEFAIAEYNAPCSKDLGNA |
| SEQ | AACT | Alpha-1- | P01011 | MERMLPLLALGLLAAGFCPAVLCHPNSPLDEENLTQE |
| ID | | antichymotrypsin | | NQDRGTHVDLGLASANVDFAFSLYKQLVLKAPDKNV |
| NO: | | | | IFSPLSISTALAFLSLGAHNTTLTEILKGLKFNLTETSEA |
| 199 | | | | EIHQSFQHLLRTLNQSSDELQLSMGNAMFVKEQLSLL |
| | | | | DRFTEDAKRLYGSEAFATDFQDSAAAKKLINDYVKN |
| | | | | GTRGKITDLIKDLDSQTMMVLVNYIFFKAKWEMPFDP |
| | | | | QDTHQSRFYLSKKKWVMVPMMSLHHLTIPYFRDEEL |
| | | | | SCTVVELKYTGNASALFILPDQDKMEEVEAMLLPETL |
| | | | | KRWRDSLEFREIGELYLPKFSISRDYNLNDILLQLGIEE |
| | | | | AFTSKADLSGITGARNLAVSQVVHKAVLDVFEEGTEA |
| | | | | SAATAVKITLLSALVETRTIVRFNRPFLMIIVPTDTQNI |
| | | | | FFMSKVTNPKQA |
| SEQ | AGP1 | Alpha-1-acid | P02763, | MALSWVLTVLSLLPLLEAQIPLCANLVPVPITNATLDR |
| ID | | glycoprotein 1 | | ITGKWFYIASAFRNEEYNKSVQEIQATFFYFTPNKTED |
| NO: | | | | TIFLREYQTRQDQCIYNTTYLNVQRENGTISRYVGGQ |
| 200 | | | | EHFAHLLILRDTKTYMLAFDVNDEKNWGLSVYADKP |
| | | | | ETTKEQLGEFYEALDCLRIPKSDVVYTDWKKDKCEPL |
| | | | | EKQHEKERKQEEGES |
| SEQ | AGP2 | Alpha-1-acid | P19652 | MALSWVLTVLSLLPLLEAQIPLCANLVPVPITNATLDR |
| ID | | glycoprotein 2 | | ITGKWFYIASAFRNEEYNKSVQEIQATFFYFTPNKTED |
| NO: | | | | TIFLREYQTRQNQCFYNSSYLNVQRENGTVSRYEGGR |
| 201 | | | | EHVAHLLFLRDTKTLMFGSYLDDEKNWGLSFYADKP |
| | | | | ETTKEQLGEFYEALDCLCIPRSDVMYTDWKKDKCEPL |
| | | | | EKQHEKERKQEEGES |
| SEQ | APOB | Apolipoprotein | P04114 | MDPPRPALLALLALPALLLLLLAGARAEEEMLENVSL |
| ID | | B-100 | | VCPKDATRFKHLRKYTYNYEAESSSGVPGTADSRSAT |
| NO: | | | | RINCKVELEVPQLCSFILKTSQCTLKEVYGFNPEGKAL |
| 202 | | | | LKKTKNSEEFAAAMSRYELKLAIPEGKQVFLYPEKDE |
| | | | | PTYILNIKRGIISALLVPPETEEAKQVLFLDTVYGNCST |
| | | | | HFTVKTRKGNVATEISTERDLGQCDRFKPIRTGISPLA |
| | | | | LIKGMTRPLSTLISSSQSCQYTLDAKRKHVAEAICKEQ |
| | | | | HLFLPFSYKNKYGMVAQVTQTLKLEDTPKINSRFFGE |
| | | | | GTKKMGLAFESTKSTSPPKQAEAVLKTLQELKKLTISE |
| | | | | QNIQRANLFNKLVTELRGLSDEAVTSLLPQLIEVSSPIT |
| | | | | LQALVQCGQPQCSTHILQWLKRVHANPLLIDVVTYLV |
| | | | | ALIPEPSAQQLREIFNMARDQRSRATLYALSHAVNNY |
| | | | | HKTNPTGTQELLDIANYLMEQIQDDCTGDEDYTYLIL |
| | | | | RVIGNMGQTMEQLTPELKSSILKCVQSTKPSLMIQKA |
| | | | | AIQALRKMEPKDKDQEVLLQTFLDDASPGDKRLAAY |
| | | | | LMLMRSPSQADINKIVQILPWEQNEQVKNFVASHIANI |
| | | | | LNSEELDIQDLKKLVKEALKESQLPTVMDFRKFSRNY |
| | | | | QLYKSVSLPSLDPASAKIEGNLIFDPNNYLPKESMLKT |
| | | | | TLTAFGFASADLIEIGLEGKGFEPTLEALFGKQGFFPDS |
| | | | | VNKALYWVNGQVPDGVSKVLVDHFGYTKDDKHEQ |
| | | | | DMVNGIMLSVEKLIKDLKSKEVPEARAYLRILGEELG |
| | | | | FASLHDLQLLGKLLLMGARTLQGIPQMIGEVIRKGSK |
| | | | | NDFFLHYIFMENAFELPTGAGLQLQISSSGVIAPGAKA |
| | | | | GVKLEVANMQAELVAKPSVSVEFVTNMGIIIPDFARS |
| | | | | GVQMNTNFFHESGLEAHVALKAGKLKFIIPSPKRPVK |
| | | | | LLSGGNTLHLVSTTKTEVIPPLIENRQSWSVCKQVFPG |
| | | | | LNYCTSGAYSNASSTDSASYYPLTGDTRLELELRPTGE |
| | | | | IEQYSVSATYELQREDRALVDTLKFVTQAEGAKQTEA |
| | | | | TMTFKYNRQSMTLSSEVQIPDFDVDLGTILRVNDESTE |
| | | | | GKTSYRLTLDIQNKKITEVALMGHLSCDTKEERKIKG |
| | | | | VISIPRLQAEARSEILAHWSPAKLLLQMDSSATAYGST |
| | | | | VSKRVAWHYDEEKIEFEWNTGTNVDTKKMTSNFPVD |
| | | | | LSDYPKSLHMYANRLLDHRVPQTDMTFRHVGSKLIV |
| | | | | AMSSWLQKASGSLPYTQTLQDHLNSLKEFNLQNMGL |
| | | | | PDFHIPENLFLKSDGRVKYTLNKNSLKIEIPLPFGGKSS |
| | | | | RDLKMLETVRTPALHFKSVGFHLPSREFQVPTFTIPKL |
| | | | | YQLQVPLLGVLDLSTNVYSNLYNWSASYSGGNTSTD |
| | | | | HFSLRARYHMKADSVVDLLSYNVQGSGETTYDHKNT |
| | | | | FTLSYDGSLRHKFLDSNIKFSHVEKLGNNPVSKGLLIF |
| | | | | DASSSWGPQMSASVHLDSKKKQHLFVKEVKIDGQFR |
| | | | | VSSFYAKGTYGLSCQRDPNTGRLNGESNLRFNSSYLQ |
| | | | | GTNQITGRYEDGTLSLTSTSDLQSGIIKNTASLKYENY |
| | | | | ELTLKSDTNGKYKNFATSNKMDMTFSKQNALLRSEY |
| | | | | QADYESLRFFSLLSGSLNSHGLELNADILGTDKINSGA |
| | | | | HKATLRIGQDGISTSATTNLKCSLLVLENELNAELGLS |
| | | | | GASMKLTTNGRFREHNAKFSLDGKAALTELSLGSAY |
| | | | | QAMILGVDSKNIFNFKVSQEGLKLSNDMMGSYAEMK |
| | | | | FDHTNSLNIAGLSLDFSSKLDNIYSSDKFYKQTVNLQL |
| | | | | QPYSLVTTLNSDLKYNALDLTNNGKLRLEPLKLHVA |
| | | | | GNLKGAYQNNEIKHIYAISSAALSASYKADTVAKVQG |
| | | | | VEFSHRLNTDIAGLASAIDMSTNYNSDSLHFSNVFRSV |
| | | | | MAPFTMTIDAHTNGNGKLALWGEHTGQLYSKFLLKA |
| | | | | EPLAFTFSHDYKGSTSHHLVSRKSISAALEHKVSALLT |
| | | | | PAEQTGTWKLKTQFNNNEYSQDLDAYNTKDKIGVEL |
| | | | | TGRTLADLTLLDSPIKVPLLLSEPINIIDALEMRDAVEK |
| | | | | PQEFTIVAFVKYDKNQDVHSINLPFFETLQEYFERNRQ |
| | | | | TIIVVLENVQRNLKHINIDQFVRKYRAALGKLPQQAN |
| | | | | DYLNSFNWERQVSHAKEKLTALTKKYRITENDIQIAL |
| | | | | DDAKINFNEKLSQLQTYMIQFDQYIKDSYDLHDLKIAI |
| | | | | ANIIDEIIEKLKSLDEHYHIRVNLVKTIHDLHLFIENIDF |
| | | | | NKSGSSTASWIQNVDTKYQIRIQIQEKLQQLKRHIQNI |
| | | | | DIQHLAGKLKQHIEAIDVRVLLDQLGTTISFERINDILE |
| | | | | HVKHFVINLIGDFEVAEKINAFRAKVHELIERYEVDQQ |
| | | | | IQVLMDKLVELAHQYKLKETIQKLSNVLQQVKIKDYF |
| | | | | EKLVGFIDDAVKKLNELSFKTFIEDVNKFLDMLIKKLK |
| | | | | SFDYHQFVDETNDKIREVTQRLNGEIQALELPQKAEA |
| | | | | LKLFLEETKATVAVYLESLQDTKITLIINWLQEALSSA |
| | | | | SLAHMKAKFRETLEDTRDRMYQMDIQQELQRYLSLV |
| | | | | GQVYSTLVTYISDWWTLAAKNLTDFAEQYSIQDWAK |
| | | | | RMKALVEQGFTVPEIKTILGTMPAFEVSLQALQKATF |
| | | | | QTPDFIVPLTDLRIPSVQINFKDLKNIKIPSRFSTPEFTIL |
| | | | | NTFHIPSFTIDFVEMKVKIIRTIDQMLNSELQWPVPDIY |
| | | | | LRDLKVEDIPLARITLPDFRLPEIAIPEFIIPTLNLNDFQV |
| | | | | PDLHIPEFQLPHISHTIEVPTFGKLYSILKIQSPLFTLDA |
| | | | | NADIGNGTTSANEAGIAASITAKGESKLEVLNFDFQA |
| | | | | NAQLSNPKINPLALKESVKFSSKYLRTEHGSEMLFFGN |
| | | | | AIEGKSNTVASLHTEKNTLELSNGVIVKINNQLTLDSN |
| | | | | TKYFHKLNIPKLDFSSQADLRNEIKTLLKAGHIAWTSS |
| | | | | GKGSWKWACPRFSDEGTHESQISFTIEGPLTSFGLSNK |
| | | | | INSKHLRVNQNLVYESGSLNFSKLEIQSQVDSQHVGH |
| | | | | SVLTAKGMALFGEGKAEFTGRHDAHLNGKVIGTLKN |
| | | | | SLFFSAQPFEITASTNNEGNLKVRFPLRLTGKIDFLNNY |
| | | | | ALFLSPSAQQASWQVSARFNQYKYNQNFSAGNNENI |
| | | | | MEAHVGINGEANLDFLNIPLTIPEMRLPYTIITTPPLKD |
| | | | | FSLWEKTGLKEFLKTTKQSFDLSVKAQYKKNKHRHSI |
| | | | | TNPLAVLCEFISQSIKSFDRHFEKNRNNALDFVTKSYN |
| | | | | ETKIKFDKYKAEKSHDELPRTFQIPGYTVPVVNVEVSP |
| | | | | FTIEMSAFGYVFPKAVSMPSFSILGSDVRVPSYTLILPS |
| | | | | LELPVLHVPRNLKLSLPDFKELCTISHIFIPAMGNITYD |
| | | | | FSFKSSVITLNTNAELFNQSDIVAHLLSSSSSVIDALQY |
| | | | | KLEGTTRLTRKRGLKLATALSLSNKFVEGSHNSTVSL |
| | | | | TTKNMEVSVATTTKAQIPILRMNFKQELNGNTKSKPT |
| | | | | VSSSMEFKYDFNSSMLYSTAKGAVDHKLSLESLTSYF |
| | | | | SIESSTKGDVKGSVLSREYSGTIASEANTYLNSKSTRSS |
| | | | | VKLQGTSKIDDIWNLEVKENFAGEATLQRIYSLWEHS |
| | | | | TKNHLQLEGLFFTNGEHTSKATLELSPWQMSALVQV |
| | | | | HASQPSSFHDFPDLGQEVALNANTKNQKIRWKNEVRI |
| | | | | HSGSFQSQVELSNDQEKAHLDIAGSLEGHLRFLKNIIL |
| | | | | PVYDKSLWDFLKLDVTTSIGRRQHLRVSTAFVYTKNP |
| | | | | NGYSFSIPVKVLADKFIIPGLKLNDLNSVLVMPTFHVP |
| | | | | FTDLQVPSCKLDFREIQIYKKLRTSSFALNLPTLPEVKF |
| | | | | PEVDVLTKYSQPEDSLIPFFEITVPESQLTVSQFTLPKS |
| | | | | VSDGIAALDLNAVANKIADFELPTIIVPEQTIEIPSIKFS |
| | | | | VPAGIVIPSFQALTARFEVDSPVYNATWSASLKNKAD |
| | | | | YVETVLDSTCSSTVQFLEYELNVLGTHKIEDGTLASKT |
| | | | | KGTFAHRDFSAEYEEDGKYEGLQEWEGKAHLNIKSP |
| | | | | AFTDLHLRYQKDKKGISTSAASPAVGTVGMDMDEDD |
| | | | | DFSKWNFYYSPQSSPDKKLTIFKTELRVRESDEETQIK |
| | | | | VNWEEEAASGLLTSLKDNVPKATGVLYDYVNKYHW |
| | | | | EHTGLTLREVSSKLRRNLQNNAEWVYQGAIRQIDDID |
| | | | | VRFQKAASGTTGTYQEWKDKAQNLYQELLTQEGQA |
| | | | | SFQGLKDNVFDGLVRVTQEFHMKVKHLIDSLIDFLNF |
| | | | | PRFQFPGKPGIYTREELCTMFIREVGTVLSQVYSKVHN |
| | | | | GSEILFSYFQDLVITLPFELRKHKLIDVISMYRELLKDL |
| | | | | SKEAQEVFKAIQSLKTTEVLRNLQDLLQFIFQLIEDNIK |
| | | | | QLKEMKFTYLINYIQDEINTIFSDYIPYVFKLLKENLCL |
| | | | | NLHKFNEFIQNELQEASQELQQIHQYIMALREEYFDPS |
| | | | | IVGWTVKYYELEEKIVSLIKNLLVALKDFHSEYIVSAS |
| | | | | NFTSQLSSQVEQFLHRNIQEYLSILTDPDGKGKEKIAE |
| | | | | LSATAQEIIKSQAIATKKIISDYHQQFRYKLQDFSDQLS |
| | | | | DYYEKFIAESKRLIDLSIQNYHTFLIYITELLKKLQSTT |
| | | | | VMNPYMKLAPGELTIIL |
| SEQ | APOM | Apolipoprotein | O95445 | MFHQIWAALLYFYGIILNSIYQCPEHSQLTTLGVDGKE |
| ID | | M | | FPEVHLGQWYFIAGAAPTKEELATFDPVDNIVFNMAA |
| NO: | | | | GSAPMQLHLRATIRMKDGLCVPRKWIYHLTEGSTDL |
| 203 | | | | RTEGRPDMKTELFSSSCPGGIMLNETGQGYQRFLLYN |
| | | | | RSPHPPEKCVEEFKSLTSCLDSKAFLLTPRNQEACELS |
| | | | | NN |
| SEQ | B2M | Beta-2- | P61769 | MSRSVALAVLALLSLSGLEAIQRTPKIQVYSRHPAENG |
| ID | | microglobulin | | KSNFLNCYVSGFHPSDIEVDLLKNGERIEKVEHSDLSF |
| NO: | | | | SKDWSFYLLYYTEFTPTEKDEYACRVNHVTLSQPKIV |
| 204 | | | | KWDRDM |
| SEQ | C1S | Complement | P09871 | MWCIVLFSLLAWVYAEPTMYGEILSPNYPQAYPSEVE |
| ID | | C1s | | KSWDIEVPEGYGIHLYFTHLDIELSENCAYDSVQIISGD |
| NO: | | subcomponent | | TEEGRLCGQRSSNNPHSPIVEEFQVPYNKLQVIFKSDF |
| 205 | | | | SNEERFTGFAAYYVATDINECTDFVDVPCSHFCNNFIG |
| | | | | GYFCSCPPEYFLHDDMKNCGVNCSGDVFTALIGEIAS |
| | | | | PNYPKPYPENSRCEYQIRLEKGFQVVVTLRREDFDVE |
| | | | | AADSAGNCLDSLVFVAGDRQFGPYCGHGFPGPLNIET |
| | | | | KSNALDIIFQTDLTGQKKGWKLRYHGDPMPCPKEDTP |
| | | | | NSVWEPAKAKYVFRDVVQITCLDGFEVVEGRVGATS |
| | | | | FYSTCQSNGKWSNSKLKCQPVDCGIPESIENGKVEDP |
| | | | | ESTLFGSVIRYTCEEPYYYMENGGGGEYHCAGNGSW |
| | | | | VNEVLGPELPKCVPVCGVPREPFEEKQRIIGGSDADIK |
| | | | | NFPWQVFFDNPWAGGALINEYWVLTAAHVVEGNRE |
| | | | | PTMYVGSTSVQTSRLAKSKMLTPEHVFIHPGWKLLEV |
| | | | | PEGRTNFDNDIALVRLKDPVKMGPTVSPICLPGTSSDY |
| | | | | NLMDGDLGLISGWGRTEKRDRAVRLKAARLPVAPLR |
| | | | | KCKEVKVEKPTADAEAYVFTPNMICAGGEKGMDSCK |
| | | | | GDSGGAFAVQDPNDKTKFYAAGLVSWGPQCGTYGL |
| | | | | YTRVKNYVDWIMKTMQENSTPRED |
| SEQ | CERU | Ceruloplasmin | P00450 | MKILILGIFLFLCSTPAWAKEKHYYIGIIETTWDYASD |
| ID | | | | HGEKKLISVDTEHSNIYLQNGPDRIGRLYKKALYLQY |
| NO: | | | | TDETFRTTIEKPVWLGFLGPIIKAETGDKVYVHLKNLA |
| 206 | | | | SRPYTFHSHGITYYKEHEGAIYPDNTTDFQRADDKVY |
| | | | | PGEQYTYMLLATEEQSPGEGDGNCVTRIYHSHIDAPK |
| | | | | DIASGLIGPLIICKKDSLDKEKEKHIDREFVVMFSVVDE |
| | | | | NFSWYLEDNIKTYCSEPEKVDKDNEDFQESNRMYSV |
| | | | | NGYTFGSLPGLSMCAEDRVKWYLFGMGNEVDVHAA |
| | | | | FFHGQALTNKNYRIDTINLFPATLFDAYMVAQNPGEW |
| | | | | MLSCQNLNHLKAGLQAFFQVQECNKSSSKDNIRGKH |
| | | | | VRHYYIAAEEIIWNYAPSGIDIFTKENLTAPGSDSAVFF |
| | | | | EQGTTRIGGSYKKLVYREYTDASFTNRKERGPEEEHL |
| | | | | GILGPVIWAEVGDTIRVTFHNKGAYPLSIEPIGVRFNK |
| | | | | NNEGTYYSPNYNPQSRSVPPSASHVAPTETFTYEWTV |
| | | | | PKEVGPTNADPVCLAKMYYSAVDPTKDIFTGLIGPMK |
| | | | | ICKKGSLHANGRQKDVDKEFYLFPTVFDENESLLLED |
| | | | | NIRMFTTAPDQVDKEDEDFQESNKMHSMNGFMYGN |
| | | | | QPGLTMCKGDSVVWYLFSAGNEADVHGIYFSGNTYL |
| | | | | WRGERRDTANLFPQTSLTLHMWPDTEGTFNVECLTT |
| | | | | DHYTGGMKQKYTVNQCRRQSEDSTFYLGERTYYIAA |
| | | | | VEVEWDYSPQREWEKELHHLQEQNVSNAFLDKGEFY |
| | | | | IGSKYKKVVYRQYTDSTFRVPVERKAEEEHLGILGPQ |
| | | | | LHADVGDKVKIIFKNMATRPYSIHAHGVQTESSTVTP |
| | | | | TLPGETLTYVWKIPERSGAGTEDSACIPWAYYSTVDQ |
| | | | | VKDLYSGLIGPLIVCRRPYLKVFNPRRKLEFALLFLVF |
| | | | | DENESWYLDDNIKTYSDHPEKVNKDDEEFIESNKMH |
| | | | | AINGRMFGNLQGLTMHVGDEVNWYLMGMGNEIDLH |
| | | | | TVHFHGHSFQYKHRGVYSSDVFDIFPGTYQTLEMFPR |
| | | | | TPGIWLLHCHVTDHIHAGMETTYTVLQNEDTKSG |
| SEQ | CFAI | Complement | P05156 | MKLLHVFLLFLCFHLRFCKVTYTSQEDLVEKKCLAKK |
| ID | | Factor I | | YTHLSCDKVFCQPWQRCIEGTCVCKLPYQCPKNGTA |
| NO: | | | | VCATNRRSFPTYCQQKSLECLHPGTKFLNNGTCTAEG |
| 207 | | | | KFSVSLKHGNTDSEGIVEVKLVDQDKTMFICKSSWSM |
| | | | | REANVACLDLGFQQGADTQRRFKLSDLSINSTECLHV |
| | | | | HCRGLETSLAECTFTKRRTMGYQDFADVVCYTQKAD |
| | | | | SPMDDFFQCVNGKYISQMKACDGINDCGDQSDELCC |
| | | | | KACQGKGFHCKSGVCIPSQYQCNGEVDCITGEDEVGC |
| | | | | AGFASVTQEETEILTADMDAERRRIKSLLPKLSCGVK |
| | | | | NRMHIRRKRIVGGKRAQLGDLPWQVAIKDASGITCG |
| | | | | GIYIGGCWILTAAHCLRASKTHRYQIWTTVVDWIHPD |
| | | | | LKRIVIEYVDRIIFHENYNAGTYQNDIALIEMKKDGNK |
| | | | | KDCELPRSIPACVPWSPYLFQPNDTCIVSGWGREKDN |
| | | | | ERVFSLQWGEVKLISNCSKFYGNRFYEKEMECAGTY |
| | | | | DGSIDACKGDSGGPLVCMDANNVTYVWGVVSWGEN |
| | | | | CGKPEFPGVYTKVANYFDWISYHVGRPFISQYNV |
| SEQ | CO5 | Complement | P01031 | MGLLGILCFLIFLGKTWGQEQTYVISAPKIFRVGASENI |
| ID | | C5 | | VIQVYGYTEAFDATISIKSYPDKKFSYSSGHVHLSSEN |
| NO: | | | | KFQNSAILTIQPKQLPGGQNPVSYVYLEVVSKHFSKSK |
| 208 | | | | RMPITYDNGFLFIHTDKPVYTPDQSVKVRVYSLNDDL |
| | | | | KPAKRETVLTFIDPEGSEVDMVEEIDHIGIISFPDFKIPS |
| | | | | NPRYGMWTIKAKYKEDFSTTGTAYFEVKEYVLPHFS |
| | | | | VSIEPEYNFIGYKNFKNFEITIKARYFYNKVVTEADVYI |
| | | | | TFGIREDLKDDQKEMMQTAMQNTMLINGIAQVTFDS |
| | | | | ETAVKELSYYSLEDLNNKYLYIAVTVIESTGGFSEEAE |
| | | | | IPGIKYVLSPYKLNLVATPLFLKPGIPYPIKVQVKDSLD |
| | | | | QLVGGVPVTLNAQTIDVNQETSDLDPSKSVTRVDDG |
| | | | | VASFVLNLPSGVTVLEFNVKTDAPDLPEENQAREGYR |
| | | | | AIAYSSLSQSYLYIDWTDNHKALLVGEHLNIIVTPKSP |
| | | | | YIDKITHYNYLILSKGKIIHFGTREKFSDASYQSINIPVT |
| | | | | QNMVPSSRLLVYYIVTGEQTAELVSDSVWLNIEEKCG |
| | | | | NQLQVHLSPDADAYSPGQTVSLNMATGMDSWVALA |
| | | | | AVDSAVYGVQRGAKKPLERVFQFLEKSDLGCGAGGG |
| | | | | LNNANVFHLAGLTFLTNANADDSQENDEPCKEILRPR |
| | | | | RTLQKKIEEIAAKYKHSVVKKCCYDGACVNNDETCE |
| | | | | QRAARISLGPRCIKAFTECCVVASQLRANISHKDMQL |
| | | | | GRLHMKTLLPVSKPEIRSYFPESWLWEVHLVPRRKQL |
| | | | | QFALPDSLTTWEIQGVGISNTGICVADTVKAKVFKDV |
| | | | | FLEMNIPYSVVRGEQIQLKGTVYNYRTSGMQFCVKM |
| | | | | SAVEGICTSESPVIDHQGTKSSKCVRQKVEGSSSHLVT |
| | | | | FTVLPLEIGLHNINFSLETWFGKEILVKTLRVVPEGVK |
| | | | | RESYSGVTLDPRGIYGTISRRKEFPYRIPLDLVPKTEIK |
| | | | | RILSVKGLLVGEILSAVLSQEGINILTHLPKGSAEAELM |
| | | | | SVVPVFYVFHYLETGNHWNIFHSDPLIEKQKLKKKLK |
| | | | | EGMLSIMSYRNADYSYSVWKGGSASTWLTAFALRVL |
| | | | | GQVNKYVEQNQNSICNSLLWLVENYQLDNGSFKENS |
| | | | | QYQPIKLQGTLPVEARENSLYLTAFTVIGIRKAFDICPL |
| | | | | VKIDTALIKADNFLLENTLPAQSTFTLAISAYALSLGD |
| | | | | KTHPQFRSIVSALKREALVKGNPPIYRFWKDNLQHKD |
| | | | | SSVPNTGTARMVETTAYALLTSLNLKDINYVNPVIKW |
| | | | | LSEEQRYGGGFYSTQDTINAIEGLTEYSLLVKQLRLSM |
| | | | | DIDVSYKHKGALHNYKMTDKNFLGRPVEVLLNDDLI |
| | | | | VSTGFGSGLATVHVTTVVHKTSTSEEVCSFYLKIDTQ |
| | | | | DIEASHYRGYGNSDYKRIVACASYKPSREESSSGSSHA |
| | | | | VMDISLPTGISANEEDLKALVEGVDQLFTDYQIKDGH |
| | | | | VILQLNSIPSSDFLCVRFRIFELFEVGFLSPATFTVYEYH |
| | | | | RPDKQCTMFYSTSNIKIQKVCEGAACKCVEADCGQM |
| | | | | QEELDLTISAETRKQTACKPEIAYAYKVSITSITVENVF |
| | | | | VKYKATLLDIYKTGEAVAEKDSEITFIKKVTCTNAEL |
| | | | | VKGRQYLIMGKEALQIKYNFSFRYIYPLDSLTWIEYW |
| | | | | PRDTTCSSCQAFLANLDEFAEDIFLNGC |
| SEQ | FETUA | Alpha-2-HS- | P02765 | MKSLVLLLCLAQLWGCHSAPHGPGLIYRQPNCDDPET |
| ID | | glycoprotein | | EEAALVAIDYINQNLPWGYKHTLNQIDEVKVWPQQP |
| NO: | | | | SGELFEIEIDTLETTCHVLDPTPVARCSVRQLKEHAVE |
| 209 | | | | GDCDFQLLKLDGKFSVVYAKCDSSPDSAEDVRKVCQ |
| | | | | DCPLLAPLNDTRVVHAAKAALAAFNAQNNGSNFQLE |
| | | | | EISRAQLVPLPPSTYVEFTVSGTDCVAKEATEAAKCNL |
| | | | | LAEKQYGFCKATLSEKLGGAEVAVTCMVFQTQPVSS |
| | | | | QPQPEGANEAVPTPVVDPDAPPSPPLGAPGLPPAGSPP |
| | | | | DSHVLLAAPPGHQLHRAHYDLRHTFMGVVSLGSPSG |
| | | | | EVSHPRKTRTVVQPSVGAAAGPVVPPCPGRIRHFKV |
| SEQ | HEMO | Hemopexin | P02790 | MARVLGAPVALGLWSLCWSLAIATPLPPTSAHGNVA |
| ID | | | | EGETKPDPDVTERCSDGWSFDATTLDDNGTMLFFKG |
| NO: | | | | EFVWKSHKWDRELISERWKNFPSPVDAAFRQGHNSV |
| 210 | | | | FLIKGDKVWVYPPEKKEKGYPKLLQDEFPGIPSPLDA |
| | | | | AVECHRGECQAEGVLFFQGDREWFWDLATGTMKER |
| | | | | SWPAVGNCSSALRWLGRYYCFQGNQFLRFDPVRGEV |
| | | | | PPRYPRDVRDYFMPCPGRGHGHRNGTGHGNSTHHGP |
| | | | | EYMRCSPHLVLSALTSDNHGATYAFSGTHYWRLDTS |
| | | | | RDGWHSWPIAHQWPQGPSAVDAAFSWEEKLYLVQG |
| | | | | TQVYVFLTKGGYTLVSGYPKRLEKEVGTPHGIILDSV |
| | | | | DAAFICPGSSRLHIMAGRRLWWLDLKSGAQATWTEL |
| | | | | PWPHEKVDGALCMEKSLGPNSCSANGPGLYLIHGPNL |
| | | | | YCYSDVEKLNAAKALPQPQNVTSLLGCTH |
| SEQ | HPT | Haptoglobin | P00738 | MSALGAVIALLLWGQLFAVDSGNDVTDIADDGCPKP |
| ID | | | | PEIAHGYVEHSVRYQCKNYYKLRTEGDGVYTLNDKK |
| NO: | | | | QWINKAVGDKLPECEADDGCPKPPEIAHGYVEHSVR |
| 211 | | | | YQCKNYYKLRTEGDGVYTLNNEKQWINKAVGDKLP |
| | | | | ECEAVCGKPKNPANPVQRILGGHLDAKGSFPWQAKM |
| | | | | VSHHNLTTGATLINEQWLLTTAKNLFLNHSENATAKD |
| | | | | IAPTLTLYVGKKQLVEIEKVVLHPNYSQVDIGLIKLKQ |
| | | | | KVSVNERVMPICLPSKDYAEVGRVGYVSGWGRNANF |
| | | | | KFTDHLKYVMLPVADQDQCIRHYEGSTVPEKKTPKSP |
| | | | | VGVQPILNEHTFCAGMSKYQEDTCYGDAGSAFAVHD |
| | | | | LEEDTWYATGILSFDKSCAVAEYGVYVKVTSIQDWV |
| | | | | QKTIAEN |
| SEQ | HRG | Histidine-rich | P04196 | MKALIAALLLITLQYSCAVSPTDCSAVEPEAEKALDLI |
| ID | | Glycoprotein | | NKRRRDGYLFQLLRIADAHLDRVENTTVYYLVLDVQ |
| NO: | | | | ESDCSVLSRKYWNDCEPPDSRRPSEIVIGQCKVIATRH |
| 212 | | | | SHESQDLRVIDFNCTTSSVSSALANTKDSPVLIDFFEDT |
| | | | | ERYRKQANKALEKYKEENDDFASFRVDRIERVARVR |
| | | | | GGEGTGYFVDFSVRNCPRHHFPRHPNVFGFCRADLFY |
| | | | | DVEALDLESPKNLVINCEVFDPQEHENINGVPPHLGHP |
| | | | | FHWGGHERSSTTKPPFKPHGSRDHHHPHKPHEHGPPP |
| | | | | PPDERDHSHGPPLPQGPPPLLPMSCSSCQHATFGTNGA |
| | | | | QRHSHNNNSSDLHPHKHHSHEQHPHGHHPHAHHPHE |
| | | | | HDTHRQHPHGHHPHGHHPHGHHPHGHHPHGHHPHC |
| | | | | HDFQDYGPCDPPPHNQGHCCHGHGPPPGHLRRRGPG |
| | | | | KGPRPFHCRQIGSVYRLPPLRKGEVLPLPEANFPSFPLP |
| | | | | HHKHPLKPDNQPFPQSVSESCPGKFKSGFPQVSMFFT |
| | | | | HTFPK |
| SEQ | IC1 | Plasma | P05155 | MASRLTLLTLLLLLLAGDRASSNPNATSSSSQDPESLQ |
| ID | | protease C1 | | DRGEGKVATTVISKMLFVEPILEVSSLPTTNSTTNSAT |
| NO: | | inhibitor | | KITANTTDEPTTQPTTEPTTQPTIQPTQPTTQLPTDSPT |
| 213 | | | | QPTTGSFCPGPVTLCSDLESHSTEAVLGDALVDFSLKL |
| | | | | YHAFSAMKKVETNMAFSPFSIASLLTQVLLGAGENTK |
| | | | | TNLESILSYPKDFTCVHQALKGFTTKGVTSVSQIFHSP |
| | | | | DLAIRDTFVNASRTLYSSSPRVLSNNSDANLELINTWV |
| | | | | AKNTNNKISRLLDSLPSDTRLVLLNAIYLSAKWKTTF |
| | | | | DPKKTRMEPFHFKNSVIKVPMMNSKKYPVAHFIDQTL |
| | | | | KAKVGQLQLSHNLSLVILVPQNLKHRLEDMEQALSPS |
| | | | | VFKAIMEKLEMSKFQPTLLTLPRIKVTTSQDMLSIMEK |
| | | | | LEFFDFSYDLNLCGLTEDPDLQVSAMQHQTVLELTET |
| | | | | GVEAAAASAISVARTLLVFEVQQPFLFVLWDQQHKFP |
| | | | | VFMGRVYDPRA |
| SEQ | IGA1 | Immunoglobulin | P01876 | ASPTSPKVFPLSLCSTQPDGNVVIACLVQGFFPQEPLS |
| ID | | heavy constant | | VTWSESGQGVTARNFPPSQDASGDLYTTSSQLTLPAT |
| NO: | | alpha 1 | | QCLAGKSVTCHVKHYTNPSQDVTVPCPVPSTPPTPSPS |
| 214 | | | | TPPTPSPSCCHPRLSLHRPALEDLLLGSEANLTCTLTGL |
| | | | | RDASGVTFTWTPSSGKSAVQGPPERDLCGCYSVSSVL |
| | | | | PGCAEPWNHGKTFTCTAAYPESKTPLTATLSKSGNTF |
| | | | | RPEVHLLPPPSEELALNELVTLTCLARGFSPKDVLVR |
| | | | | WLQGSQELPREKYLTWASRQEPSQGTTTFAVTSILRV |
| | | | | AAEDWKKGDTFSCMVGHEALPLAFTQKTIDRLAGKP |
| | | | | THVNVSVVMAEVDGTCY |
| SEQ | IGG1 | Immunoglobulin | P01857 | ASTKGPSVFPLAPSSKSTSGGTAALGCLVKDYFPEPVT |
| ID | | heavy constant | | VSWNSGALTSGVHTFPAVLQSSGLYSLSSVVTVPSSSL |
| NO: | | gamma 1 | | GTQTYICNVNHKPSNTKVDKKVEPKSCDKTHTCPPCP |
| 215 | | | | APELLGGPSVFLFPPKPKDTLMISRTPEVTCVVVDVSH |
| | | | | EDPEVKFNWYVDGVEVHNAKTKPREEQYNSTYRVVS |
| | | | | VLTVLHQDWLNGKEYKCKVSNKALPAPIEKTISKAK |
| | | | | GQPREPQVYTLPPSRDELTKNQVSLTCLVKGFYPSDIA |
| | | | | VEWESNGQPENNYKTTPPVLDSDGSFFLYSKLTVDKS |
| | | | | RWQQGNVFSCSVMHEALHNHYTQKSLSLSPGK |
| SEQ | IGG2 | Immunoglobulin | P01859 | ASTKGPSVFPLAPCSRSTSESTAALGCLVKDYFPEPVT |
| ID | | heavy constant | | VSWNSGALTSGVHTFPAVLQSSGLYSLSSVVTVPSSN |
| NO: | | gamma 2 | | FGTQTYTCNVDHKPSNTKVDKTVERKCCVECPPCPAP |
| 216 | | | | PVAGPSVFLFPPKPKDTLMISRTPEVTCVVVDVSHEDP |
| | | | | EVQFNWYVDGVEVHNAKTKPREEQFNSTFRVVSVLT |
| | | | | VVHQDWLNGKEYKCKVSNKGLPAPIEKTISKTKGQP |
| | | | | REPQVYTLPPSREEMTKNQVSLTCLVKGFYPSDISVE |
| | | | | WESNGQPENNYKTTPPMLDSDGSFFLYSKLTVDKSR |
| | | | | WQQGNVFSCSVMHEALHNHYTQKSLSLSPGK |
| SEQ | IGG3 | Immunoglobulin | P01860 | ASTKGPSVFPLAPCSRSTSGGTAALGCLVKDYFPEPVT |
| ID | | heavy constant | | VSWNSGALTSGVHTFPAVLQSSGLYSLSSVVTVPSSSL |
| NO: | | gamma 3 | | GTQTYTCNVNHKPSNTKVDKRVELKTPLGDTTHTCP |
| 217 | | | | RCPEPKSCDTPPPCPRCPEPKSCDTPPPCPRCPEPKSCD |
| | | | | TPPPCPRCPAPELLGGPSVFLFPPKPKDTLMISRTPEVT |
| | | | | CVVVDVSHEDPEVQFKWYVDGVEVHNAKTKPREEQ |
| | | | | YNSTFRVVSVLTVLHQDWLNGKEYKCKVSNKALPAP |
| | | | | IEKTISKTKGQPREPQVYTLPPSREEMTKNQVSLTCLV |
| | | | | KGFYPSDIAVEWESSGQPENNYNTTPPMLDSDGSFFL |
| | | | | YSKLTVDKSRWQQGNIFSCSVMHEALHNRFTQKSLSL |
| | | | | SPGK |
| SEQ | ITIH2 | Inter-alpha- | P19823 | MKRLTCFFICFFLSEVSGFEIPINGLSEFVDYEDLVELA |
| ID | | trypsin | | PGKFQLVAENRRYQRSLPGESEEMMEEVDQVTLYSY |
| NO: | | inhibitor | | KVQSTITSRMATTMIQSKVVNNSPQPQNVVFDVQIPK |
| 218 | | heavy chain | | GAFISNFSMTVDGKTFRSSIKEKTVGRALYAQARAKG |
| | | H2 | | KTAGLVRSSALDMENFRTEVNVLPGAKVQFELHYQE |
| | | | | VKWRKLGSYEHRIYLQPGRLAKHLEVDVWVIEPQGL |
| | | | | RFLHVPDTFEGHFDGVPVISKGQQKAHVSFKPTVAQQ |
| | | | | RICPNCRETAVDGELVVLYDVKREEKAGELEVENGYF |
| | | | | VHFFAPDNLDPIPKNILFVIDVSGSMWGVKMKQTVEA |
| | | | | MKTILDDLRAEDHFSVIDFNQNIRTWRNDLISATKTQ |
| | | | | VADAKRYIEKIQPSGGTNINEALLRAIFILNEANNLGLL |
| | | | | DPNSVSLIILVSDGDPTVGELKLSKIQKNVKENIQDNIS |
| | | | | LFSLGMGFDVDYDFLKRLSNENHGIAQRIYGNQDTSS |
| | | | | QLKKFYNQVSTPLLRNVQFNYPHTSVTDVTQNNFHN |
| | | | | YFGGSEIVVAGKFDPAKLDQIESVITATSANTQLVLET |
| | | | | LAQMDDLQDFLSKDKHADPDFTRKLWAYLTINQLLA |
| | | | | ERSLAPTAAAKRRITRSILQMSLDHHIVTPLTSLVIENE |
| | | | | AGDERMLADAPPQDPSCCSGALYYGSKVVPDSTPSW |
| | | | | ANPSPTPVISMLAQGSQVLESTPPPHVMRVENDPHFII |
| | | | | YLPKSQKNICFNIDSEPGKILNLVSDPESGIVVNGQLV |
| | | | | GAKKPNNGKLSTYFGKLGFYFQSEDIKIEISTETITLSH |
| | | | | GSSTFSLSWSDTAQVTNQRVQISVKKEKVVTITLDKE |
| | | | | MSFSVLLHRVWKKHPVNVDFLGIYIPPTNKFSPKAHG |
| | | | | LIGQFMQEPKIHIFNERPGKDPEKPEASMEVKGQKLIIT |
| | | | | RGLQKDYRTDLVFGTDVTCWFVHNSGKGFIDGHYKD |
| | | | | YFVPQLYSFLKRP |
| SEQ | KLKB1 | Plasma | P03952 | MILFKQATYFISLFATVSCGCLTQLYENAFFRGGDVAS |
| ID | | Kallikrein | | MYTPNAQYCQMRCTFHPRCLLFSFLPASSINDMEKRF |
| NO: | | | | GCFLKDSVTGTLPKVHRTGAVSGHSLKQCGHQISACH |
| 219 | | | | RDIYKGVDMRGVNFNVSKVSSVEECQKRCTNNIRCQ |
| | | | | FFSYATQTFHKAEYRNNCLLKYSPGGTPTAIKVLSNV |
| | | | | ESGFSLKPCALSEIGCHMNIFQHLAFSDVDVARVLTPD |
| | | | | AFVCRTICTYHPNCLFFTFYTNVWKIESQRNVCLLKTS |
| | | | | ESGTPSSSTPQENTISGYSLLTCKRTLPEPCHSKIYPGV |
| | | | | DFGGEELNVTFVKGVNVCQETCTKMIRCQFFTYSLLP |
| | | | | EDCKEEKCKCFLRLSMDGSPTRIAYGTQGSSGYSLRL |
| | | | | CNTGDNSVCTTKTSTRIVGGTNSSWGEWPWQVSLQV |
| | | | | KLTAQRHLCGGSLIGHQWVLTAAHCFDGLPLQDVWR |
| | | | | IYSGILNLSDITKDTPFSQIKEIIIHQNYKVSEGNHDIALI |
| | | | | KLQAPLNYTEFQKPICLPSKGDTSTIYTNCWVTGWGF |
| | | | | SKEKGEIQNILQKVNIPLVTNEECQKRYQDYKITQRM |
| | | | | VCAGYKEGGKDACKGDSGGPLVCKHNGMWRLVGIT |
| | | | | SWGEGCARREQPGVYTKVAEYMDWILEKTQSSDGK |
| | | | | AQMQSPA |
| SEQ | SEPP1 | Selenoprotein | P49908 | MWRSLGLALALCLLPSGGTESQDQSSLCKQPPAWSIR |
| ID | | P | | DQDPMLNSNGSVTVVALLQASUYLCILQASKLEDLR |
| NO: | | | | VKLKKEGYSNISYIVVNHQGISSRLKYTHLKNKVSEHI |
| 220 | | | | PVYQQEENQTDVWTLLNGSKDDFLIYDRCGRLVYHL |
| | | | | GLPFSFLTFPYVEEAIKIAYCEKKCGNCSLTTLKDEDF |
| | | | | CKRVSLATVDKTVETPSPHYHHEHHHNHGHQHLGSS |
| | | | | ELSENQQPGAPNAPTHPAPPGLHHHHKHKGQHRQGH |
| | | | | PENRDMPASEDLQDLQKKLCRKRCINQLLCKLPTDSE |
| | | | | LAPRSUCCHCRHLIFEKTGSAITUQCKENLPSLCSUQG |
| | | | | LRAEENITESCQURLPPAAUQISQQLIPTEASASURUK |
| | | | | NQAKKUEUPSN |
| SEQ | TRFE | Serotransferrin | P02787 | MRLAVGALLVCAVLGLCLAVPDKTVRWCAVSEHEA |
| ID | | | | TKCQSFRDHMKSVIPSDGPSVACVKKASYLDCIRAIA |
| NO: | | | | ANEADAVTLDAGLVYDAYLAPNNLKPVVAEFYGSKE |
| 221 | | | | DPQTFYYAVAVVKKDSGFQMNQLRGKKSCHTGLGR |
| | | | | SAGWNIPIGLLYCDLPEPRKPLEKAVANFFSGSCAPCA |
| | | | | DGTDFPQLCQLCPGCGCSTLNQYFGYSGAFKCLKDG |
| | | | | AGDVAFVKHSTIFENLANKADRDQYELLCLDNTRKP |
| | | | | VDEYKDCHLAQVPSHTVVARSMGGKEDLIWELLNQA |
| | | | | QEHFGKDKSKEFQLFSSPHGKDLLFKDSAHGFLKVPP |
| | | | | RMDAKMYLGYEYVTAIRNLREGTCPEAPTDECKPVK |
| | | | | WCALSHHERLKCDEWSVNSVGKIECVSAETTEDCIAK |
| | | | | IMNGEADAMSLDGGFVYIAGKCGLVPVLAENYNKSD |
| | | | | NCEDTPEAGYFAIAVVKKSASDLTWDNLKGKKSCHT |
| | | | | AVGRTAGWNIPMGLLYNKINHCRFDEFFSEGCAPGSK |
| | | | | KDSSLCKLCMGSGLNLCEPNNKEGYYGYTGAFRCLV |
| | | | | EKGDVAFVKHQTVPQNTGGKNPDPWAKNLNEKDYE |
| | | | | LLCLDGTRKPVEEYANCHLARAPNHAVVTRKDKEAC |
| | | | | VHKILRQQQHLFGSNVTDCSGNFCLFRSETKDLLFRD |
| | | | | DTVCLAKLHDRNTYEKYLGEEYVKAVGNLRKCSTSS |
| | | | | LLEACTFRRP |
| SEQ | ZA2G | Zinc-alpha-2- | P25311 | MVRMVPVLLSLLLLLGPAVPQENQDGRYSLTYIYTGL |
| ID | | glycoprotein | | SKHVEDVPAFQALGSLNDLQFFRYNSKDRKSQPMGL |
| NO: | | | | WRQVEGMEDWKQDSQLQKAREDIFMETLKDIVEYY |
| 222 | | | | NDSNGSHVLQGRFGCEIENNRSSGAFWKYYYDGKDY |
| | | | | IEFNKEIPAWVPFDPAAQITKQKWEAEPVYVQRAKAY |
| | | | | LEEECPATLRKYLKYSKNILDRQDPPSVVVTSHQAPG |
| | | | | EKKKLKCLAYDFYPGKIDVHWTRAGEVQEPELRGDV |
| | | | | LHNGNGTYQSWVVVAVPPQDTAPYSCHVQHSSLAQP |
| | | | | LVVPWEAS |
| SEQ | IGA2 | Immunoglobulin | P01877 | ASPTSPKVFPLSLDSTPQDGNVVVACLVQGFFPQEPLS |
| ID | | heavy constant | | VTWSESGQNVTARNFPPSQDASGDLYTTSSQLTLPAT |
| NO: | | alpha 2 | | QCPDGKSVTCHVKHYTNSSQDVTVPCRVPPPPPCCHP |
| 223 | | | | RLSLHRPALEDLLLGSEANLTCTLTGLRDASGATFTW |
| | | | | TPSSGKSAVQGPPERDLCGCYSVSSVLPGCAQPWNHG |
| | | | | ETFTCTAAHPELKTPLTANITKSGNTFRPEVHLLPPPSE |
| | | | | ELALNELVTLTCLARGFSPKDVLVRWLQGSQELPREK |
| | | | | YLTWASRQEPSQGTTTYAVTSILRVAAEDWKKGETFS |
| | | | | CMVGHEALPLAFTQKTIDRMAGKPTHINVSVVMAEA |
| | | | | DGTCY |

[1448] Table 35 includes the Peptide Structure (PS) Name (e.g., A2GL_186_5402), which is a reference code for the protein name (e.g., A2GL), followed by the glycan linking site position in the protein (e.g., the number 186 that is preceded by an underscore and represents a sequential amino acid position in protein A2GL), and followed by the glycan structure GL number (e.g., the number 5402 that is preceded by an underscore and represents a glycan composition Hex(5)HexNAc(4)Fuc(0)NeuAc(2)). The Peptide Structure (PS) Name of Table 35 contains a prefix that represents an abbreviation (that may include a combination of letters and numbers) for a protein abbreviation that corresponds to the Protein Abbreviation of Table 34. The term Glycan Linking Site Pos. in Protein Sequence is a number that refers to the sequential position of an amino acid of the corresponding protein in which a glycan is attached. For the Glycan Linking Site Pos. in Protein Sequence, the amino acid position of the peptide sequence is defined by the sequentially numbered order of amino acids based on the Uniprot ID of the corresponding protein for the peptide sequence. The term Glycan Linking Site Pos. in Peptide Sequence is a number that refers to the sequential position of an amino acid of the corresponding peptide in which a glycan is attached. For the Glycan Linking Site Pos. in peptide Sequence, the amino acid position of the peptide sequence is defined by the sequentially numbered order of amino acids for the peptide sequence. The term Glycan Structure GL No. is a number that corresponds to a symbol structure and a composition of the glycan as indicated in Tables 36A and 36B.

TABLE 35
Details of peptides and glycopeptides
with statistically significant changing
abundances in healthy and NSCLC samples

| | | | Glycan | Glycan | |
|---|---|---|---|---|---|
| | | | Linking | Linking | |
| | | | Site | Site | |
| | | | Pos. in | Pos. in | Glycan |
| SEQ ID | Peptide Structure | Peptide | Peptide | Protein | Structure |
| NO | (PS) NAME | Sequence | Sequence | Sequence | GL NO |
| SEQ ID | A2GL_186_5402 | LPPGLLANFTLL | 8 | 186 | 5402 |
| NO: 224 | | R | | | |
| SEQ ID | A2MG_1424_6511 | VSNQTLSLFFTV | 3 | 1424 | 6511 |
| NO: 225 | | LQDVPVR | | | |
| SEQ ID | A2MG | VSNQTLSLFFTV | N/A | N/A | Non- |
| NO: 226 | | LQDVPVR | | | Glycosylated |
| SEQ ID | A2MG_869_5402 | SLGNVNFTVSAE | 6 | 869 | 5402 |
| NO: 227 | | ALESQELCGTEV | | | |
| | | PSVPEHGR | | | |
| SEQ ID | AACT_127_6503 | TLNQSSDELQLS | 3 | 127 | 6503 |
| NO: 228 | | MGNAMFVK | | | |
| SEQ ID | AACT_271_6513 | YTGNASALFILP | 4 | 271 | 6513 |
| NO: 229 | | DQDK | | | |
| SEQ ID | APOB_3411_5301 | FVEGSHNSTVSL | 7 | 3411 | 5301 |
| NO: 230 | | TTK | | | |
| SEQ ID | C1S_174_5402 | NCGVNCSGDVF | 5 | 174 | 5402 |
| NO: 231 | | TALIGEIASPNYP | | | |
| | | KPYPENSR | | | |
| SEQ ID | CFAI_70_5402 | NGTAVCATNR | 1 | 70 | 5402 |
| NO: 232 | | | | | |
| SEQ ID | CO5_741_5401 | ANISHK | 2 | 741 | 5401 |
| NO: 233 | | | | | |
| SEQ ID | FETUA_176_5402 | AALAAFNAQNN | 11 | 176 | 5402 |
| NO: 234 | | GSNFQLEEISR | | | |
| SEQ ID | FETUA | TVVQPSVGAAA | N/A | N/A | Non- |
| NO: 235 | | GPVVPPCPGR | | | Glycosylated |
| SEQ ID | HEMO_187_6513 | SWPAVGNCSSA | 7 | 187 | 6513 |
| NO: 236 | | LR | | | |
| SEQ ID | HEMO_453_5402 | ALPQPQNVTSLL | 7 | 453 | 5402 |
| NO: 237 | | GCTH | | | |
| SEQ ID | HPT_184_6501 | MVSHHNLTTGA | 6 | 184 | 6501 |
| NO: 238 | | TLINEQWLLTTA | | | |
| | | K | | | |
| SEQ ID | HPT_184_6502 | MVSHHNLTTGA | 6 | 184 | 6502 |
| NO: 239 | | TLINEQWLLTTA | | | |
| | | K | | | |
| SEQ ID | HPT_241_6512 | VVLHPNYSQVDI | 6 | 241 | 6512 |
| NO: 240 | | GLIK | | | |
| SEQ ID | IC1_238_5402 | DTFVNASR | 5 | 238 | 5402 |
| NO: 241 | | | | | |
| SEQ ID | IC1_253_6513 | VLSNNSDANLEL | 4 | 253 | 6513 |
| NO: 242 | | INTWVAK | | | |
| SEQ ID | IGA12_144MC_3500 | PALEDLLLGSEA | 13 | 144 | 3500 |
| NO: 243 | | NLTCTLTGLR | | | |
| SEQ ID | IGG1_297_3510 | EEQYNSTYR | 5 | 180 | 3510 |
| NO: 244 | | | | | |
| SEQ ID | IGG1_297_4500 | EEQYNSTYR | 5 | 180 | 4500 |
| NO: 245 | | | | | |
| SEQ ID | IGG1_297_5410 | EEQYNSTYR | 5 | 180 | 5410 |
| NO: 246 | | | | | |
| SEQ ID | IGG2_297_3500 | EEQFNSTFR | 5 | 175 | 3500 |
| NO: 247 | | | | | |
| SEQ ID | IGG2_297_4410 | EEQFNSTFR | 5 | 175 | 4410 |
| NO: 248 | | | | | |
| SEQ ID | IGG2_297_5410 | EEQFNSTFR | 5 | 175 | 5410 |
| NO: 249 | | | | | |
| SEQ ID | KLKB1 | IYSGILNLSDITK | N/A | N/A | Non- |
| NO: 250 | | | | | Glycosylated |
| SEQ ID | KLKB1_494_5410 | LQAPLNYTEFQK | 6 | 494 | 5410 |
| NO: 251 | | PICLPSK | | | |
| SEQ ID | IGG3 | TPEVTCVVVDVS | N/A | N/A | Non- |
| NO: 252 | | HEDPEVQFK | | | Glycosylated |
| SEQ ID | APOM | AFLLTPR | N/A | N/A | Non- |
| NO: 253 | | | | | Glycosylated |
| SEQ ID | B2M | VNHVTLSQPK | N/A | N/A | Non- |
| NO: 254 | | | | | Glycosylated |
| SEQ ID | SEPP1 | VSLATVDK | N/A | N/A | Non- |
| NO: 255 | | | | | Glycosylated |
| SEQ ID | TRFE_630_5402_ | QQQHLFGSNVT | 9 | 630 | 5402 |
| NO: 256 | NH3LOSS | DCSGNFCLFR | | | |
| SEQ ID | ZA2G_128_5402 | FGCEIENNR | 8 | 128 | 5402 |
| NO: 257 | | | | | |
| SEQ ID | A2MG_1424_5411 | VSNQTLSLFFTV | 3 | 1424 | 5411 |
| NO: 258 | | LQDVPVR | | | |
| SEQ ID | A2MG_1424_5412 | VSNQTLSLFFTV | 3 | 1424 | 5412 |
| NO: 259 | | LQDVPVR | | | |
| SEQ ID | A2MG_247_5200 | IITILEEEMNVSV | 10 | 247 | 5200 |
| NO: 260 | | CGLYTYGKPVP | | | |
| | | GHVTVSICR | | | |
| SEQ ID | A2MG_247_5401 | IITILEEEMNVSV | 10 | 247 | 5401 |
| NO: 261 | | CGLYTYGKPVP | | | |
| | | GHVTVSICR | | | |
| SEQ ID | A2MG_247MC_5401 | IITILEEEMNVSV | 10 | 247 | 5401 |
| NO: 262 | | CGLYTYGK | | | |
| SEQ ID | A2MG_869_5401 | SLGNVNFTVSAE | 6 | 869 | 5401 |
| NO: 263 | | ALESQELCGTEV | | | |
| | | PSVPEHGR | | | |
| SEQ ID | AGP12_72_6503 | SVQEIQATFFYFT | 15 | 72 | 6503 |
| NO: 264 | | PNK | | | |
| SEQ ID | AGP12_72_7603 | SVQEIQATFFYFT | 15 | 72 | 7603 |
| NO: 265 | | PNK | | | |
| SEQ ID | AGP12_72_7604 | SVQEIQATFFYFT | 15 | 72 | 7604 |
| NO: 266 | | PNK | | | |
| SEQ ID | AGP12_72MC_6503 | SVQEIQATFFYFT | 15 | 72 | 6503 |
| NO: 267 | | PNKTEDTIFLR | | | |
| SEQ ID | AGP12_72MC_7603 | SVQEIQATFFYFT | 15 | 72 | 7603 |
| NO: 268 | | PNKTEDTIFLR | | | |
| SEQ ID | AGP2_103_6513 | ENGTVSR | 2 | 103 | 6513 |
| NO: 269 | | | | | |
| SEQ ID | AGP2_103_7614 | ENGTVSR | 2 | 103 | 7614 |
| NO: 270 | | | | | |
| SEQ ID | APOB_983_5402 | QVFPGLNYCTSG | 16 | 983 | 5402 |
| NO: 271 | | AYSNASSTDSAS | | | |
| | | YYPLTGDTR | | | |
| SEQ ID | CERU_138_6513 | EHEGAIYPDNTT | 10 | 138 | 6513 |
| NO: 272 | | DFQR | | | |
| SEQ ID | CERU_762_6513 | ELHHLQEQNVS | 9 | 762 | 6513 |
| NO: 273 | | NAFLDK | | | |
| SEQ ID | FETUA_176_6501 | AALAAFNAQNN | 11 | 176 | 6501 |
| NO: 274 | | GSNFQLEEISR | | | |
| SEQ ID | FETUA_176_6513 | AALAAFNAQNN | 11 | 176 | 6513 |
| NO: 275 | | GSNFQLEEISR | | | |
| SEQ ID | HPT_207_121015 | NLFLNHSENATA | 5, | 207, | 6513, |
| NO: 276 | | K | 9 | 211 | 6502 |
| SEQ ID | HPT_207_5401 | NLFLNHSENATA | 5 | 207 | 5401 |
| NO: 277 | | K | | | |
| SEQ ID | HPT_241_6500 | VVLHPNYSQVDI | 6 | 241 | 6500 |
| NO: 278 | | GLIK | | | |
| SEQ ID | HPT_241_6511 | VVLHPNYSQVDI | 6 | 241 | 6511 |
| NO: 279 | | GLIK | | | |
| SEQ ID | HRG_125_5402 | VIDFNCTTSSVSS | 5 | 125 | 5402 |
| NO: 280 | | ALANTK | | | |
| SEQ ID | HRG_271_1102 | SSTTKPPFKPHGS | 1 | 271 | 1102 |
| NO: 281 | | R | | | |
| SEQ ID | HRG_271_2201 | SSTTKPPFKPHGS | 1 | 271 | 2201 |
| NO: 282 | | R | | | |
| SEQ ID | IGA12_144_5400 | LSLHRPALEDLL | 18 | 144 | 5400 |
| NO: 283 | | LGSEANLTCTLT | | | |
| | | GLR | | | |
| SEQ ID | IGA12_144_5401 | LSLHRPALEDLL | 18 | 144 | 5401 |
| NO: 284 | | LGSEANLTCTLT | | | |
| | | GLR | | | |
| SEQ ID | IGA12_144MC_4501 | PALEDLLLGSEA | 13 | 144 | 4501 |
| NO: 285 | | NLTCTLTGLR | | | |
| SEQ ID | IGA12_144MC_5401 | PALEDLLLGSEA | 13 | 144 | 5401 |
| NO: 286 | | NLTCTLTGLR | | | |
| SEQ ID | IGG1_297_3410 | EEQYNSTYR | 5 | 180 | 3410 |
| NO: 287 | | | | | |
| SEQ ID | IGG1_297_4310 | EEQYNSTYR | 5 | 180 | 4310 |
| NO: 288 | | | | | |
| SEQ ID | IGG1_297_4410_Z4 | EEQYNSTYR | 5 | 180 | 4410 |
| NO: 289 | | | | | |
| SEQ ID | IGG2 | EEQFNSTFR | N/A | N/A | Non- |
| NO: 290 | | | | | Glycosylated |
| SEQ ID | ITIH2_118_5402 | GAFISNFSMTVD | 6 | 118 | 5402 |
| NO: 291 | | GK | | | |
| SEQ ID | KLKB1_127_5402 | GVNFNVSK | 5 | 127 | 5402 |
| NO: 292 | | | | | |
| SEQ ID | KLKB1_494_6503 | LQAPLNYTEFQK | 6 | 494 | 6503 |
| NO: 293 | | PICLPSK | | | |
| SEQ ID | TRFE_630_5400 | QQQHLFGSNVT | 9 | 630 | 5400 |
| NO: 294 | | DCSGNFCLFR | | | |
| SEQ ID | TRFE_630_5402 | QQQHLFGSNVT | 9 | 630 | 5402 |
| NO: 295 | | DCSGNFCLFR | | | |
| SEQ ID | TRFE_630_6513 | QQQHLFGSNVT | 9 | 630 | 6513 |
| NO: 296 | | DCSGNFCLFR | | | |

[1449] In some embodiments, the term AGP 12 for SEQ ID NOs: 67-71 represent that the glycopeptide is a fragment of either AGP1 or AGP2. In some embodiments, the term IGA12 for SEQ ID NOs: 243, 283-286 represent that the glycopeptide is a fragment of either IGA1 or IGA2. For the SEQ ID NO:276 in Table 35, the identity of the glycopeptide is one of two possibilities that have the same monoisotopic mass. In the first possibility, the glycan having the Glycan GL NO 6513 is attached to the peptide with a Glycan linking site position of 5 in the peptide sequence. In the second possibility, the glycan having the Glycan GL NO 6502 is attached to the peptide with a Glycan linking site position of 9 in the peptide sequence.

[1450] In Table 35, if the first number subsequent to the first underscore in the Peptide Structure (PS) NAME is inconsistent with the Glycan Linking Site Pos. in Protein Sequence column, then the Glycan Linking Site Pos. in Protein Sequence column should be used for identification of the peptide. In Table 35, if the second number subsequent to the second underscore in the Peptide Structure (PS) NAME is inconsistent with the Glycan Structure GL NO column, then the Glycan Structure GL NO column should be used for identification of the glycan portion of the glycopeptide. If the Peptide Structure (PS) NAME does not contain any numbers, then the peptide is non-glycosylated. In some instances of the Peptide Structure (PS) NAME, subsequent to the prefix, there is a number noted with the notation MC that indicates that there was a missed cleavage at position in the peptide sequence as noted by the number. In some instances of the Peptide Structure (PS) NAME, there is a suffix NH3LOSS to indicate a loss of a NH₃ group.

[1451] Tables 36A and 36B illustrate the symbol structure and composition of detected glycan moieties that correspond to glycopeptides of Table 35 based on the Glycan GL NO. The term Symbol Structure illustrates a geometric linking structure of the carbohydrates where the bottommost carbohydrate such as N-acetylglucosamine is bound to the designated amino acid for an N-linked glycan and the rightmost carbohydrate such as N-acetylgalactosamine is bound to the designated amino acid for an O-linked glycan. It should be noted that the Glycan Structure GL NOs. 1102 and 2201 are O-linked glycans that are in Table 36A and that N-linked glycans are in Table 36B. For reference, N-linked glycans have a glycan attached to the amino acid asparagine and O-linked glycans have a glycan attached to either a serine or a threonine.

[1452] The identity of the various monosaccharides is illustrated by the Legend section located at the end of Table 36B. The abbreviations of the Legend are Glc that represents glucose and is indicated by a dark circle, Gal that represents galactose and is indicated by an open circle, Man that represents mannose and is indicated by a circle with intermediate grey shading, Fuc that represents fucose and is indicated by a dark triangle, Neu5Ac that represents N-acetylneuraminic acid and is indicated by a dark diamond, GlcNAc that represents N-acetylglucosamine and is indicated by a dark square, GalNAc that represents N-acetylgalactosamine and is indicated by an open square, and ManNAc that represents N-acetylmannosamine and is indicated by a square with intermediate grey shading.

[1453] The term Composition refers to the number of various classes of carbohydrates that make up the glycan. The quantity for each class of carbohydrate is depicted as a number in parenthesis to the right of an abbreviation that corresponds to the class of the carbohydrate. The abbreviations for these classes are Hex, HexNAc, Fuc, and NeuAc that respectively correspond to hexose, N-acetylhexosamine, fucose, and N-acetylneuraminic acid. It should be noted that hexose sugars include glucose, galactose, and mannose; and N-acetylhexosamine sugars includes N-acetylglucosamine, N-acetylgalactosamine, and N-acetylmannosamine. In various embodiments, the terms Neu5Ac, NeuAc, and N-acetylneuraminic acid may be referred to as sialic acid.

[1454] Referring back to Tables 36A and 36B, for some entries, there are two symbol structures provided for one Glycan Structure GL NO such as, for example, Glycan Structure GL NO 4500. Thus, the identify of a peptide that references a Glycan Structure GL NO that has two symbol structures could one of two possibilities based on the MRM of the LC-MS analysis. In some instances, a bracket symbol is used as part of the Symbol Structure to indicate that the precise bonding linkage is not exactly known, but that the linking line segment is attached to one of the plurality of adjacent carbohydrates immediately adjacent to the bracket

TABLE 36A
Glycan structure GL NO, symbol structure, and composition
of detected glycan moieties for O-linked glycans

| Glycan Structure | Symbol | |
|---|---|---|
| GL NO. | Structure | Composition |
| 1102 | [symbol] | Hex(1)HexNAc(1)Fuc(0)NeuAc(2) |
| 2201 | [symbol] | Hex(2)HexNAc(2)Fuc(0)NeuAc(1) |

TABLE 36B
Glycan structure GL NO, symbol structure, and composition
of detected glycan moieties for N-linked glycans

| Glycan Structure | Symbol | |
|---|---|---|
| GL NO. | Structure | Composition |
| 3410 | [symbol] | Hex(3)HexNAc(4)Fuc(1)NeuAc(0) |
| 3500 | [symbol] | Hex(3)HexNAc(5)Fuc(0)NeuAc(0) |
| 3510 | [symbol] | Hex(3)HexNAc(5)Fuc(1)NeuAc(0) |
| 4310 | [symbol] | Hex(4)HexNAc(3)Fuc(1)NeuAc(0) |
| 4410 | [symbol] | Hex(4)HexNAc(4)Fuc(1)NeuAc(0) |
| 4500 | [symbol] | Hex(4)HexNAc(5)Fuc(0)NeuAc(0) |
| 4501 | [symbol] | Hex(4)HexNAc(5)Fuc(0)NeuAc(1) |
| 5200 | [symbol] | Hex(5)HexNAc(2)Fuc(0)NeuAc(0) |
| 5301 | [symbol] | Hex(5)HexNAc(3)Fuc(0)NeuAc(1) |
| 5400 | [symbol] | Hex(5)HexNAc(4)Fuc(0)NeuAc(0) |
| 5401 | [symbol] | Hex(5)HexNAc(4)Fuc(0)NeuAc(1) |
| 5402 | [symbol] | Hex(5)HexNAc(4)Fuc(0)NeuAc(2) |
| 5410 | [symbol] | Hex(5)HexNAc(4)Fuc(1)NeuAc(0) |
| 5411 | [symbol] | Hex(5)HexNAc(4)Fuc(1)NeuAc(1) |
| 5412 | [symbol] | Hex(5)HexNAc(4)Fuc(1)NeuAc(2) |
| 6500 | [symbol] | Hex(6)HexNAc(5)Fuc(0)NeuAc(0) |
| 6501 | [symbol] | Hex(6)HexNAc(5)Fuc(0)NeuAc(1) |
| 6502 | [symbol] | Hex(6)HexNAc(5)Fuc(0)NeuAc(2) |
| 6503 | [symbol] | Hex(6)HexNAc(5)Fuc(0)NeuAc(3) |
| 6511 | [symbol] | Hex(6)HexNAc(5)Fuc(1)NeuAc(1) |
| 6512 | [symbol] | Hex(6)HexNAc(5)Fuc(1)NeuAc(2) |
| 6513 | [symbol] | Hex(6)HexNAc(5)Fuc(1)NeuAc(3) |
| 7603 | [symbol] | Hex(7)HexNAc(6)Fuc(0)NeuAc(3) |
| 7604 | [symbol] | Hex(7)HexNAc(6)Fuc(0)NeuAc(4) |
| 7614 | [symbol] | Hex(7)HexNAc(6)Fuc(1)NeuAc(4) |

- Legend for Tables 36A and 36B
● Glc [symbol]
Gal [symbol]
Man [symbol]
Fuc [symbol]
Neu5Ac
▪ GlcNAc [symbol]
GalNAc [symbol]
ManNAc

TABLE 37
MRM-MS and liquid chromatography (LC) parameters for peptide structures
associated with healthy control and NSCLC populations

| SEQ | | | Collision | 1st | 1st | 2nd | 2nd | 1st | 2nd |
|---|---|---|---|---|---|---|---|---|---|
| ID | Monoisotopic | RT | Energy | Precursor | Precursor | Precursor | Precursor | Product | Product |
| NO | mass | (min) | (V) | m/z | Charge | m/z | Charge | m/z | m/z |
| 224 | 3628.627482 | 40.2 | 32 | 1210.9 | 3 | 908.4 | 4 | 366.1 | 366.1 |
| 258 | 4221.908394 | 43.5 | 22 | 1057 | 4 | 1057 | 4 | 366.1 | 1184.1 |
| 259 | 4513.003804 | 44 | 23 | 1129.7 | 4 | 1129.7 | 4 | 366.1 | 1183.6 |
| 225 | 4587.040582 | 43.3 | 23 | 1148.3 | 4 | 1148.3 | 4 | 366.1 | 1183.6 |
| 226 | 2162.173506 | 44.8 | 10 | 721.8 | 3 | 721.8 | 3 | 371.24 | 826.48 |
| 260 | 4950.310912 | 38.8 | 25 | 1239.1 | 4 | N/A | N/A | 1314.2 | N/A |
| 261 | 5647.565058 | 39.3 | 30 | 1413.6 | 4 | 1131.1 | 5 | 366.1 | 1313.3 |
| 262 | 4344.878414 | 40.165 | 30 | 1450 | 3 | 1450 | 3 | 366.1 | 1318.7 |
| 263 | 5326.297412 | 35.1 | 22 | 1066.7 | 5 | 1066.7 | 5 | 366.1 | 1206.6 |
| 227 | 5617.392822 | 35.9 | 25 | 1124.9 | 5 | 1124.9 | 5 | 366.1 | 1206.2 |
| 228 | 5073.050342 | 34.1 | 35 | 1269.8 | 4 | 1269.8 | 4 | 366.1 | 1208.6 |
| 229 | 4758.930872 | 31.3 | 30 | 1191.2 | 4 | 1191.2 | 4 | 366.1 | 978.5 |
| 264 | 4779.946464 | 37.7 | 30 | 1196.5 | 4 | 1196.5 | 4 | 366.1 | 1062.5 |
| 265 | 5145.078652 | 37.5 | 25 | 1287.8 | 4 | 1287.8 | 4 | 366.1 | 1062.5 |
| 266 | 5436.174062 | 37.8 | 30 | 1360.5 | 4 | 1360.5 | 4 | 366.1 | 1062.5 |
| 267 | 5755.448988 | 41 | 28 | 1152.7 | 5 | 1152.7 | 5 | 366.1 | 1550.3 |
| 268 | 6120.581176 | 40.9 | 23 | 1531.9 | 4 | 1225.7 | 5 | 366.1 | 1550.3 |
| 269 | 3768.424656 | 4.6 | 33 | 1257.5 | 3 | 1257.5 | 3 | 366.1 | 965.5 |
| 270 | 4424.652254 | 4.7 | 30 | 1107.4 | 4 | 1107.4 | 4 | 366.1 | 965.5 |
| 230 | 3316.397426 | 12.6 | 28 | 1106.8 | 3 | N/A | N/A | 366.1 | N/A |
| 271 | 5754.335366 | 33.6 | 30 | 1440.3 | 4 | N/A | N/A | 366.1 | N/A |
| 231 | 5730.401612 | 41 | 25 | 1147.8 | 5 | 1434.3 | 4 | 366.1 | 366.1 |
| 272 | 4898.89152 | 17.1 | 30 | 1226.2 | 4 | 1226.2 | 4 | 366.1 | 1048.5 |
| 273 | 5028.0545 | 20.8 | 30 | 1258.5 | 4 | 1258.5 | 4 | 274.1 | 1113 |
| 232 | 3267.260004 | 6.4 | 34 | 1090.1 | 3 | N/A | N/A | 366.1 | N/A |
| 233 | 2582.037538 | 3.9 | 20 | 862 | 3 | N/A | N/A | 366.1 | N/A |
| 234 | 4568.91817 | 30.4 | 28 | 1143.7 | 4 | N/A | N/A | 366.1 | N/A |
| 274 | 4642.954948 | 29.8 | 29 | 1161.7 | 4 | N/A | N/A | 366.1 | N/A |
| 275 | 5371.203674 | 30.4 | 34 | 1343.8 | 4 | N/A | N/A | 366.1 | N/A |
| 235 | 2015.062182 | 23.65 | 15 | 672.8 | 3 | 672.8 | 3 | 683.33 | 586.28 |
| 236 | 4410.719444 | 21.5 | 25 | 1104.2 | 4 | N/A | N/A | 274.1 | N/A |
| 237 | 3939.644654 | 30.6 | 30 | 1314.9 | 3 | N/A | N/A | 366.1 | N/A |
| 238 | 4957.194128 | 32.2 | 20 | 992.8 | 5 | N/A | N/A | 366.1 | N/A |
| 239 | 5248.289538 | 33.5 | 26 | 1051 | 5 | 1051 | 5 | 366.1 | 1441.7 |
| 276 | 7034.688732 | 13.2 | 29 | 1173.6 | 6 | N/A | N/A | 366.1 | N/A |
| 277 | 3371.403238 | 13.5 | 30 | 1124.8 | 3 | 1124.8 | 3 | 366.1 | 831.4 |
| 278 | 3781.71769 | 27.6 | 30 | 1261.6 | 3 | 1261.6 | 3 | 366.1 | 999.5 |
| 279 | 4218.871006 | 28.9 | 25 | 1055.7 | 4 | 1055.7 | 4 | 366.1 | 999.5 |
| 240 | 4509.966416 | 30 | 28 | 1128.8 | 4 | N/A | N/A | 366.1 | N/A |
| 280 | 4218.740064 | 28.4 | 25 | 1056.2 | 4 | 1407.9 | 3 | 366.1 | 366.1 |
| 281 | 2473.123096 | 7.3 | 15 | 619.5 | 4 | N/A | N/A | 274.1 | N/A |
| 282 | 2547.159874 | 5.5 | 25 | 638 | 4 | 638 | 4 | 274.1 | 865.4 |
| 241 | 3113.207564 | 10.2 | 25 | 1039.1 | 3 | 1039.1 | 3 | 366.1 | 1112.5 |
| 242 | 5107.14298 | 35.7 | 40 | 1278.3 | 4 | 1278.3 | 4 | 204.1 | 1152.6 |
| 283 | 4585.172492 | 40.2 | 28 | 1147.3 | 4 | N/A | N/A | 204.1 | N/A |
| 284 | 4876.267902 | 40.8 | 20 | 976.3 | 5 | N/A | N/A | 366.1 | N/A |
| 243 | 3857.786056 | 42 | 27 | 1287.6 | 3 | 1287.6 | 3 | 204.1 | 1281.2 |
| 285 | 4310.934286 | 42.4 | 35 | 1079.2 | 4 | 1079.2 | 4 | 204.1 | 1281.2 |
| 286 | 4269.907738 | 42.4 | 20 | 1069 | 4 | 1069 | 4 | 366.1 | 1281.2 |
| 287 | 2633.03854 | 7.9 | 21 | 879 | 3 | 879 | 3 | 204.1 | 1392.6 |
| 244 | 2836.117908 | 8.1 | 15 | 946.5 | 3 | 946.5 | 3 | 204.1 | 1392.6 |
| 288 | 2592.011992 | 7.8 | 35 | 1297.5 | 2 | N/A | N/A | 366.1 | N/A |
| 289 | 2795.09136 | 7.8 | 15 | 699.8 | 4 | 699.8 | 4 | 204.1 | 1392.6 |
| 245 | 2852.112822 | 8.1 | 23 | 951.7 | 3 | 951.7 | 3 | 204.1 | 1392.6 |
| 246 | 2957.14418 | 7.8 | 24 | 987.1 | 3 | 987.1 | 3 | 366.1 | 1392.6 |
| 247 | 2658.070174 | 13.1 | 30 | 887.4 | 3 | N/A | N/A | 1360.6 | N/A |
| 248 | 2763.101532 | 13 | 22 | 922.1 | 3 | 922.1 | 3 | 204.1 | 1360.6 |
| 249 | 2925.154352 | 12.7 | 20 | 976.1 | 3 | N/A | N/A | 366.1 | N/A |
| 290 | 1156.514874 | 14.93 | 16 | 579.6 | 2 | 579.6 | 2 | 624.3 | 510.3 |
| 291 | 3677.469324 | 29.2 | 30 | 1227.5 | 3 | N/A | N/A | 366.1 | N/A |
| 292 | 3068.222488 | 14 | 25 | 1024.1 | 3 | 1024.1 | 3 | 366.1 | 1067.5 |
| 250 | 1435.792214 | 35.295 | 20 | 719.3 | 2 | 719.3 | 2 | 1160.7 | 903.5 |
| 251 | 4014.816354 | 30.4 | 20 | 1004.7 | 4 | N/A | N/A | 366.1 | N/A |
| 293 | 5107.176866 | 33.5 | 38 | 1277.8 | 4 | N/A | N/A | 366.1 | N/A |
| 252 | 2413.147086 | 31.9 | 25 | 805.4 | 3 | N/A | N/A | 994.5 | 1044 |
| 253 | 816.485756 | 23.2 | 10 | 409.2 | 2 | N/A | N/A | 599.4 | 486.3 |
| 254 | 1121.61928 | 9.5 | 25 | 561.8 | 2 | N/A | N/A | 244.2 | 455.3 |
| 255 | 831.470164 | 12.7 | 10 | 416.7 | 2 | N/A | N/A | 646.4 | 733.4 |
| 294 | 4136.698372 | 30.4 | 25 | 1035.6 | 4 | N/A | N/A | 366.1 | N/A |
| 295 | 4718.889192 | 32.7 | 29 | 1181.1 | 4 | N/A | N/A | 366.1 | N/A |
| 256 | 4701.863 | 35.2 | 29 | 1177 | 4 | N/A | N/A | 366.1 | N/A |
| 296 | 5521.174696 | 33.2 | 27 | 1105.6 | 5 | 1105.6 | 5 | 366.1 | 1359.6 |
| 257 | 3342.25967 | 10.6 | 30 | 1115.1 | 3 | 1115.1 | 3 | 366.1 | 1341.6 |

[1455] Table 37 shows various parameters associated with the identification of the peptide and glycopeptides using LC and MRM-MS. The retention time (RT) represents the amount of time in minutes for the peptide elute from the chromatography column. The collision energy represents the energy applied to the peptide for creating fragments (i.e., product ions) such as, for example, in the 2^{nd} quadrupole of the triple quadrupole MS. The first precursor m/z represents a ratio value associated with an ionized form having a first precursor charge for the peptide or glycopeptide. Similarly, the second precursor m/z represents a ratio value associated with an ionized form having a second precursor charge for the peptide or glycopeptide. The first precursor ion is associated with a first product ion having a m/z ratio that was formed from a collision and the second precursor ion is associated with a second product ion having a m/z ratio that was formed from a collision. Under certain circumstances, the first precursor and the second precursor may be the same, but the associated first and second product m/z ratios are different.

[1456] To demonstrate the statistical significance in the peptide structure concentration difference between the healthy control and NSCLC populations (stages 1-4 population, stages 1-2 population, or stages 3-4 population), the fold changes, p-values, false discovery rates (FDR), and area under the curved (AUC) using one marker in the model are provided in Tables 38A and 38B. Fold-changes for individual peptides and glycopeptides, were calculated on normalized abundances of NSCLC stages 1-4 samples vs control (Table 38A). NSCLC stages 1-2 samples vs control (Table 38B), and NSCLC stages 3-4 vs control samples (Table 38B). For example, the fold change can be based the concentration of a biomarker from one of the NSCLC cohorts divided by the concentration of the same biomarker from the control cohort. In general, fold changes that are much higher or lower than unity are associated with a difference between the two cohorts. False discovery rate was calculated using the Benjamini-Hochberg method. Age- and sex-adjusted differential expression analysis for 596 normalized biomarkers were performed to evaluate statistically significant differential abundances using an FDR-adjusted q-value of 0.05 as a cutoff. Repeated five-fold cross-validated LASSO-regularized logistic regression was performed to create a multivariable classifier that predicts whether a serum sample belongs to the healthy or NSCLC cohort.

TABLE 38A
Differential expression analysis for healthy
control and NSCLC (stages 1-4) sample sets

| | Stages | | | Area under |
|---|---|---|---|---|
| | 1-4 / | | False | curve using |
| | Control | | Discovery | only one |
| | Fold | | Rate | marker in |
| SEQ ID NO | Change | p value | (FDR) | model |
| 271 | 1.272 | 4.42E−30 | 1.18E−27 | 0.8526 |
| 261 | 0.78 | 6.95E−28 | 1.23E−25 | 0.8732 |
| 282 | 2.583 | 1.07E−26 | 1.42E−24 | 0.8461 |
| 275 | 2.08 | 1.03E−25 | 1.09E−23 | 0.8434 |
| 263 | 1.267 | 3.59E−25 | 3.19E−23 | 0.8153 |
| 266 | 0.633 | 6.74E−25 | 5.12E−23 | 0.8364 |
| 262 | 0.757 | 8.08E−25 | 5.37E−23 | 0.8358 |
| 279 | 0.472 | 2.11E−24 | 1.25E−22 | 0.8253 |
| 277 | 0.526 | 6.60E−23 | 3.51E−21 | 0.8236 |
| 258 | 0.734 | 4.93E−22 | 2.38E−20 | 0.831 |
| 226 | 0.821 | 7.77E−22 | 3.44E−20 | 0.8372 |
| 259 | 0.772 | 6.78E−20 | 2.69E−18 | 0.793 |
| 284 | 0.758 | 7.09E−20 | 2.69E−18 | 0.8161 |
| 267 | 0.714 | 1.34E−19 | 4.74E−18 | 0.823 |
| 246 | 0.692 | 1.24E−18 | 4.12E−17 | 0.8777 |
| 260 | 0.65 | 1.32E−18 | 4.12E−17 | 0.8119 |
| 274 | 2.187 | 1.76E−18 | 5.20E−17 | 0.803 |
| 278 | 0.505 | 4.29E−18 | 1.20E−16 | 0.7883 |
| 294 | 1.956 | 5.84E−18 | 1.55E−16 | 0.8053 |
| 296 | 1.408 | 1.08E−17 | 2.74E−16 | 0.7992 |
| 227 | 1.337 | 1.55E−17 | 3.75E−16 | 0.7764 |
| 276 | 1.61 | 1.76E−17 | 4.07E−16 | 0.8271 |
| 286 | 0.777 | 3.65E−17 | 7.77E−16 | 0.8111 |
| 270 | 1.382 | 8.66E−17 | 1.77E−15 | 0.8192 |
| 268 | 0.729 | 1.05E−16 | 2.07E−15 | 0.7722 |
| 265 | 0.775 | 1.10E−16 | 2.09E−15 | 0.8127 |
| 295 | 0.905 | 3.08E−16 | 5.65E−15 | 0.785 |
| 281 | 1.487 | 3.26E−16 | 5.66E−15 | 0.7524 |
| 290 | 1.371 | 7.95E−16 | 1.32E−14 | 0.8152 |
| 273 | 1.218 | 2.95E−15 | 4.76E−14 | 0.7959 |
| 236 | 1.355 | 4.44E−15 | 6.75E−14 | 0.807 |
| 264 | 0.789 | 4.63E−15 | 6.84E−14 | 0.7997 |
| 292 | 1.214 | 4.90E−15 | 7.04E−14 | 0.793 |
| 287 | 1.376 | 9.02E−15 | 1.26E−13 | 0.8415 |
| 257 | 1.163 | 1.06E−14 | 1.43E−13 | 0.7496 |
| 283 | 1.257 | 1.50E−14 | 1.92E−13 | 0.7798 |
| 280 | 1.178 | 1.52E−14 | 1.92E−13 | 0.7922 |
| 272 | 1.199 | 3.13E−14 | 3.70E−13 | 0.7726 |
| 293 | 1.469 | 5.12E−14 | 5.92E−13 | 0.7975 |
| 289 | 0.88 | 5.47E−14 | 6.20E−13 | 0.7773 |
| 269 | 1.434 | 1.00E−13 | 1.11E−12 | 0.7993 |
| 244 | 1.359 | 2.37E−13 | 2.48E−12 | 0.8362 |
| 285 | 1.217 | 6.08E−13 | 6.22E−12 | 0.7774 |
| 291 | 1.106 | 1.52E−12 | 1.49E−11 | 0.8038 |
| 241 | 1.113 | 3.92E−12 | 3.73E−11 | 0.7083 |
| 288 | 0.853 | 5.09E−12 | 4.75E−11 | 0.8071 |
| 231 | 0.806 | 2.41E−11 | 2.00E−10 | 0.6848 |
| 242 | 1.32 | 1.40E−10 | 1.12E−09 | 0.7999 |
| 237 | 1.051 | 1.14E−09 | 7.81E−09 | 0.6865 |
| 229 | 1.36 | 1.72E−09 | 1.12E−08 | 0.7383 |
| 243 | 1.301 | 1.79E−09 | 1.15E−08 | 0.8077 |
| 245 | 0.636 | 2.61E−09 | 1.61E−08 | 0.7035 |
| 230 | 1.43 | 4.58E−09 | 2.68E−08 | 0.7325 |
| 240 | 1.492 | 7.60E−09 | 4.21E−08 | 0.7622 |
| 232 | 1.302 | 1.49E−08 | 7.78E−08 | 0.7192 |
| 251 | 1.271 | 1.11E−07 | 5.01E−07 | 0.6912 |
| 235 | 0.891 | 6.53E−06 | 2.17E−05 | 0.6638 |
| 256 | 0.944 | 8.00E−06 | 2.63E−05 | 0.6892 |
| 247 | 0.699 | 4.27E−03 | 8.42E−03 | 0.5962 |
| 238 | 0.904 | 1.68E−02 | 2.91E−02 | 0.5722 |
| 234 | 0.962 | 3.93E−02 | 6.28E−02 | 0.6331 |
| 248 | 0.97 | 1.11E−01 | 1.57E−01 | 0.6445 |
| 233 | 1.036 | 1.25E−01 | 1.74E−01 | 0.5753 |
| 250 | 0.97 | 1.32E−01 | 1.81E−01 | 0.5959 |
| 249 | 0.939 | 1.47E−01 | 1.97E−01 | 0.698 |
| 224 | 0.984 | 4.29E−01 | 5.03E−01 | 0.5457 |
| 228 | 1.019 | 4.58E−01 | 5.26E−01 | 0.5308 |
| 239 | 0.973 | 4.64E−01 | 5.32E−01 | 0.4884 |
| 225 | 0.989 | 7.30E−01 | 7.86E−01 | 0.5634 |

TABLE 38B
Differential expression analysis for healthy control
and NSCLC (stages 1-2 or stages 3-4) sample sets

| | Stages | | | Area under | Stages | | | Area under |
|---|---|---|---|---|---|---|---|---|
| | 1-2/ | | False | curve using | 3-4/ | | False | curve using |
| SEQ | Control | | Discovery | only one | Control | | Discovery | only one |
| ID | Fold | p | Rate | marker in | Fold | p | Rate | marker in |
| NO | Change | value | (FDR) | model | Change | value | (FDR) | model |
| 271 | 1.271 | 6.83E−23 | 1.82E−20 | 0.8433 | 1.263 | 1.97E−21 | 1.90E−19 | 0.8682 |
| 261 | 0.797 | 8.86E−20 | 1.18E−17 | 0.867 | 0.765 | 1.29E−22 | 3.44E−20 | 0.8809 |
| 282 | 2.179 | 1.04E−15 | 3.47E−14 | 0.8358 | 2.982 | 1.02E−21 | 1.80E−19 | 0.8616 |
| 275 | 1.911 | 1.15E−17 | 6.11E−16 | 0.8293 | 2.229 | 2.15E−21 | 1.90E−19 | 0.8599 |
| 263 | 1.268 | 5.01E−19 | 4.68E−17 | 0.8167 | 1.259 | 3.41E−15 | 1.55E−13 | 0.8117 |
| 266 | 0.648 | 1.23E−16 | 5.05E−15 | 0.8268 | 0.605 | 7.49E−21 | 5.70E−19 | 0.8458 |
| 262 | 0.777 | 6.05E−18 | 3.58E−16 | 0.8342 | 0.749 | 5.35E−18 | 3.37E−16 | 0.8371 |
| 279 | 0.537 | 2.66E−14 | 7.45E−13 | 0.8119 | 0.412 | 1.56E−21 | 1.90E−19 | 0.8463 |
| 277 | 0.534 | 6.24E−17 | 2.77E−15 | 0.8266 | 0.527 | 8.71E−15 | 3.09E−13 | 0.8197 |
| 258 | 0.712 | 5.16E−20 | 9.14E−18 | 0.8452 | 0.76 | 1.07E−12 | 2.22E−11 | 0.8077 |
| 226 | 0.81 | 1.79E−17 | 8.66E−16 | 0.8269 | 0.828 | 4.66E−15 | 1.77E−13 | 0.8537 |
| 259 | 0.746 | 5.28E−19 | 4.68E−17 | 0.8131 | 0.806 | 1.20E−09 | 1.39E−08 | 0.7618 |
| 284 | 0.754 | 9.75E−16 | 3.46E−14 | 0.809 | 0.772 | 8.44E−13 | 1.87E−11 | 0.8267 |
| 267 | 0.683 | 4.46E−18 | 2.97E−16 | 0.8484 | 0.764 | 2.51E−09 | 2.52E−08 | 0.7935 |
| 246 | 0.718 | 4.45E−12 | 8.01E−11 | 0.8659 | 0.688 | 3.80E−15 | 1.55E−13 | 0.8921 |
| 260 | 0.618 | 3.86E−18 | 2.93E−16 | 0.8314 | 0.683 | 2.37E−11 | 4.36E−10 | 0.7819 |
| 274 | 1.923 | 6.65E−12 | 1.04E−10 | 0.8041 | 2.477 | 1.24E−14 | 4.11E−13 | 0.7981 |
| 278 | 0.484 | 1.35E−15 | 4.22E−14 | 0.7875 | 0.545 | 1.93E−13 | 5.41E−12 | 0.7886 |
| 294 | 1.734 | 1.51E−11 | 2.06E−10 | 0.7822 | 2.153 | 1.49E−16 | 7.90E−15 | 0.8403 |
| 296 | 1.392 | 1.56E−13 | 3.99E−12 | 0.7885 | 1.401 | 4.25E−13 | 1.02E−11 | 0.8132 |
| 227 | 1.317 | 1.58E−13 | 3.99E−12 | 0.7688 | 1.361 | 1.93E−13 | 5.41E−12 | 0.7824 |
| 276 | 1.58 | 2.90E−12 | 5.92E−11 | 0.8198 | 1.658 | 3.66E−15 | 1.55E−13 | 0.8379 |
| 286 | 0.772 | 2.04E−14 | 6.02E−13 | 0.81 | 0.795 | 1.81E−10 | 2.60E−09 | 0.8113 |
| 270 | 1.356 | 1.02E−12 | 2.36E−11 | 0.8119 | 1.37 | 1.60E−10 | 2.36E−09 | 0.8246 |
| 268 | 0.727 | 1.60E−12 | 3.55E−11 | 0.7618 | 0.714 | 3.48E−13 | 8.83E−12 | 0.7921 |
| 265 | 0.765 | 5.20E−16 | 1.98E−14 | 0.8065 | 0.774 | 7.00E−12 | 1.33E−10 | 0.8215 |
| 295 | 0.914 | 4.54E−12 | 8.01E−11 | 0.7843 | 0.897 | 2.59E−13 | 6.88E−12 | 0.7846 |
| 281 | 1.416 | 8.53E−11 | 1.01E−09 | 0.7506 | 1.506 | 6.22E−12 | 1.23E−10 | 0.753 |
| 290 | 1.335 | 4.56E−10 | 5.05E−09 | 0.8026 | 1.428 | 5.70E−18 | 3.37E−16 | 0.8277 |
| 273 | 1.228 | 3.94E−12 | 7.49E−11 | 0.8036 | 1.198 | 7.56E−10 | 9.81E−09 | 0.7828 |
| 236 | 1.355 | 1.12E−11 | 1.62E−10 | 0.8085 | 1.34 | 2.67E−10 | 3.55E−09 | 0.8039 |
| 264 | 0.785 | 3.63E−12 | 7.15E−11 | 0.8092 | 0.817 | 1.39E−08 | 1.19E−07 | 0.7847 |
| 292 | 1.215 | 5.43E−12 | 8.83E−11 | 0.7836 | 1.217 | 1.03E−10 | 1.61E−09 | 0.803 |
| 287 | 1.309 | 1.50E−08 | 1.21E−07 | 0.827 | 1.386 | 1.17E−10 | 1.78E−09 | 0.8585 |
| 257 | 1.173 | 7.02E−12 | 1.07E−10 | 0.747 | 1.14 | 1.99E−09 | 2.10E−08 | 0.7518 |
| 283 | 1.253 | 5.01E−11 | 6.50E−10 | 0.7809 | 1.22 | 4.91E−09 | 4.75E−08 | 0.7804 |
| 280 | 1.147 | 8.45E−10 | 8.32E−09 | 0.7795 | 1.19 | 2.93E−11 | 5.20E−10 | 0.8105 |
| 272 | 1.169 | 1.43E−08 | 1.17E−07 | 0.76 | 1.214 | 4.88E−11 | 8.38E−10 | 0.7873 |
| 293 | 1.507 | 6.85E−13 | 1.66E−11 | 0.7938 | 1.462 | 1.03E−10 | 1.61E−09 | 0.7986 |
| 289 | 0.871 | 1.12E−11 | 1.62E−10 | 0.7886 | 0.885 | 1.64E−08 | 1.38E−07 | 0.7583 |
| 269 | 1.401 | 1.52E−09 | 1.44E−08 | 0.8016 | 1.438 | 8.33E−10 | 1.03E−08 | 0.7917 |
| 244 | 1.318 | 4.86E−08 | 3.40E−07 | 0.8403 | 1.29 | 1.77E−06 | 8.71E−06 | 0.8276 |
| 285 | 1.218 | 2.71E−09 | 2.36E−08 | 0.7877 | 1.186 | 1.32E−06 | 6.73E−06 | 0.7652 |
| 291 | 1.108 | 5.17E−09 | 4.31E−08 | 0.798 | 1.101 | 2.72E−07 | 1.62E−06 | 0.8099 |
| 241 | 1.116 | 6.99E−10 | 7.15E−09 | 0.7033 | 1.108 | 6.88E−08 | 4.81E−07 | 0.7162 |
| 288 | 0.868 | 6.76E−08 | 4.56E−07 | 0.7939 | 0.851 | 1.07E−09 | 1.27E−08 | 0.8236 |
| 231 | 0.803 | 7.81E−11 | 9.66E−10 | 0.7076 | 0.83 | 3.26E−07 | 1.86E−06 | 0.6661 |
| 242 | 1.304 | 2.16E−08 | 1.69E−07 | 0.7954 | 1.316 | 1.64E−07 | 1.01E−06 | 0.8024 |
| 237 | 1.045 | 2.96E−06 | 1.47E−05 | 0.6727 | 1.055 | 6.58E−07 | 3.55E−06 | 0.7045 |
| 229 | 1.308 | 6.03E−06 | 2.72E−05 | 0.7353 | 1.404 | 2.00E−08 | 1.63E−07 | 0.7423 |
| 243 | 1.284 | 2.22E−06 | 1.14E−05 | 0.8059 | 1.27 | 1.15E−05 | 4.73E−05 | 0.8066 |
| 245 | 0.562 | 8.36E−11 | 1.01E−09 | 0.7393 | 0.736 | 6.69E−04 | 1.88E−03 | 0.6516 |
| 230 | 1.544 | 2.66E−09 | 2.36E−08 | 0.7616 | 1.304 | 2.78E−06 | 1.31E−05 | 0.6961 |
| 240 | 1.571 | 5.18E−09 | 4.31E−08 | 0.7785 | 1.372 | 1.29E−04 | 4.44E−04 | 0.7377 |
| 232 | 1.346 | 2.93E−08 | 2.22E−07 | 0.7255 | 1.216 | 5.43E−05 | 2.05E−04 | 0.7145 |
| 251 | 1.224 | 9.88E−05 | 3.37E−04 | 0.667 | 1.302 | 9.05E−08 | 5.87E−07 | 0.7175 |
| 235 | 0.893 | 6.72E−05 | 2.40E−04 | 0.6475 | 0.887 | 2.20E−04 | 7.09E−04 | 0.6825 |
| 256 | 0.946 | 1.39E−04 | 4.59E−04 | 0.6747 | 0.941 | 7.90E−05 | 2.86E−04 | 0.7101 |
| 247 | 0.687 | 1.10E−02 | 2.28E−02 | 0.6102 | 0.651 | 8.10E−03 | 1.62E−02 | 0.5773 |
| 238 | 0.947 | 2.66E−01 | 3.63E−01 | 0.5368 | 0.858 | 3.83E−03 | 9.01E−03 | 0.617 |
| 234 | 0.958 | 4.13E−02 | 7.27E−02 | 0.5949 | 0.958 | 6.65E−02 | 1.02E−01 | 0.6803 |
| 248 | 0.976 | 2.62E−01 | 3.58E−01 | 0.6358 | 0.951 | 3.40E−02 | 5.70E−02 | 0.6619 |
| 233 | 1.061 | 2.71E−02 | 5.13E−02 | 0.6076 | 1.006 | 8.37E−01 | 8.71E−01 | 0.5361 |
| 250 | 0.958 | 6.97E−02 | 1.16E−01 | 0.5961 | 0.985 | 5.28E−01 | 6.03E−01 | 0.6033 |
| 249 | 1.005 | 9.18E−01 | 9.34E−01 | 0.6674 | 0.907 | 6.60E−02 | 1.02E−01 | 0.7415 |
| 224 | 0.979 | 3.48E−01 | 4.43E−01 | 0.5375 | 0.984 | 4.76E−01 | 5.56E−01 | 0.5517 |
| 228 | 1.05 | 9.53E−02 | 1.52E−01 | 0.5374 | 0.992 | 7.79E−01 | 8.17E−01 | 0.4827 |
| 239 | 0.999 | 9.80E−01 | 9.82E−01 | 0.4995 | 0.966 | 4.20E−01 | 4.95E−01 | 0.5282 |
| 225 | 0.954 | 2.14E−01 | 3.02E−01 | 0.5789 | 1.024 | 5.51E−01 | 6.24E−01 | 0.5357 |

### Example 6. Training and Validation of Diagnostic Models

[1457] The quantified concentrations of various peptide structures identified in Table 35 (e.g., SEQ ID NOs: 224-296) across the entire sample set were used to train a regularized regression model (e.g., LASSO regression model) to generate a disease indicator for a subject. The disease indicator was generated as a score (e.g., a probability score), wherein the range in which the score falls enables diagnosis or classification as a healthy state or a NSCLC state. The same markers were used to train a regularized regression model (e.g., LASSO regression model). Coefficients for the regularized regression model (e.g., LASSO regression model) are provided in Table 39.

TABLE 39
Coefficients for each marker used in the regularized
regression model (e.g., LASSO regression model)

| | Coefficients for | Coefficients for | Coefficients for |
|---|---|---|---|
| | model predicting | model predicting | model predicting |
| | probability of | probability of | probability of |
| | having NSCLC | having NSCLC | having NSCLC |
| | based on control | based on control | based on control |
| SEQ ID NO | vs stages 1-4 | vs stages 1-2 | vs stages 3-4 |
| (Intercept) | 0.75719123 | −0.0340956 | −0.4020039 |
| 224 | N/A | 0.17004465 | N/A |
| 225 | N/A | N/A | 0.053271 |
| 226 | N/A | N/A | −0.0169616 |
| 227 | N/A | 0.06704283 | N/A |
| 228 | N/A | N/A | 0.01076784 |
| 229 | 0.29409065 | N/A | 0.33640677 |
| 230 | N/A | N/A | 0.02291029 |
| 231 | −0.0263181 | N/A | N/A |
| 232 | 0.08908578 | N/A | N/A |
| 233 | 0.19048452 | 0.10331115 | 0.05524534 |
| 234 | −0.089109 | N/A | −0.0256861 |
| 235 | N/A | N/A | −0.1392993 |
| 236 | 0.05759125 | N/A | 0.15024667 |
| 237 | N/A | N/A | 0.06035004 |
| 238 | N/A | 0.09845643 | N/A |
| 239 | 0.40050612 | N/A | 0.28329752 |
| 240 | N/A | 0.25400149 | N/A |
| 241 | 0.20270253 | 0.18259914 | 0.00158212 |
| 242 | N/A | 0.16515737 | 0.05928281 |
| 243 | N/A | N/A | 0.08498688 |
| 244 | 0.41864233 | 0.36128256 | 0.39412099 |
| 245 | −0.0374678 | N/A | N/A |
| 246 | N/A | N/A | −0.0450124 |
| 247 | −0.1605237 | −0.0222012 | N/A |
| 248 | −0.055033 | −0.0309227 | N/A |
| 249 | −0.0577257 | N/A | N/A |
| 250 | −0.13873 | −0.0479855 | N/A |
| 251 | −0.0326004 | −0.171405 | N/A |
| 252 | 0.12386169 | 0.01319359 | N/A |
| 253 | −0.1090814 | −0.081731 | N/A |
| 254 | 0.00820188 | 0.17822201 | 0.10494401 |
| 255 | −0.3321263 | −0.3515829 | −0.1436638 |
| 256 | N/A | N/A | −0.192089 |
| 257 | N/A | N/A | 0.09775612 |

[1458] Using the values of Table 39, a probability can be determined by summing together the product of the concentration of each biomarker in the sample and the respective coefficient (of one column) and then adding the summation and the intercept to yield the logit of a probability score. For example, the logit of the probability, to which the inverse logit function can be applied, is equal to:

$${\sum }_{i = 27}^{i = 60} [ ( {Concentration}_{SEQ ID NO : i} ) \times ( {Coefficient}_{SEQ ID NO : i} ) ] + Intercept$$

[1459] With respect to the above equations and Table 39, coefficients that were N/A could be construed as zero. Using a FDR<0.05 in comparing NSCLC and healthy control samples, 432 biomarkers with significant abundance differences were identified. Using 70% of the complete cohort (balanced by case/control membership, NSCLC stage, sex, and age quartile) as a training set, a total of 375 glycopeptide and non-glycosylated peptide biomarker features were selected that remained differentially expressed at FDR-adjusted q-value ≤0.05 as input into a LASSO-regularized multivariable classifier. This resulted in a 19-biomarker model (Table 40) exhibiting an accuracy of 94.8% (96.9% sensitivity, 91.2% specificity) and AUC of 0.989 in predicting NSCLC for all stages (i.e., stages 1-4). This classifier was validated in an independent test set including the remaining 30% of subjects, yielding an accuracy of 94.5% (95.5% sensitivity, 93.0% specificity) and AUC of 0.975. Sensitivity in the test set was 100%/96%/99%/96%/94%/100%, for NSCLC stages 0, 1, 2, 3, 4, and “unknown”, respectively. It should be noted that stage 0 is a cohort where a carcinoma is in situ and is considered the earliest stage at which lung cancer can be detected. The stage “unknown” refers to samples that have NSCLC, but the information regarding stage is unknown.

[1460] FIG. 41 is a model performance plot 1200 illustrating the predictive performance of a regularized regression model (e.g., LASSO regression model) trained and evaluated on the training data set and test data set splits for all stages of NSCLC (stages 1-4). FIG. 43 is a model performance plot 1400 illustrating the predictive performance of the regularized regression model (e.g., LASSO regression model) trained and evaluated on the training data set and test data set splits for early-stage NSCLC (stages 1-2). FIG. 45 is a model performance plot 1600 illustrating the predictive performance of the regularized regression model (e.g., LASSO regression model) trained and evaluated on the training data set and test data set splits for late-stage NSCLC (stages 3-4).

[1461] FIG. 42 illustrates a receiver-operating-characteristic (ROC) curve/area under curve (AUC) plot 1300, depicting that the regularized regression model (e.g., LASSO regression model) trained and evaluated on the training data set and test data set splits for all stages of NSCLC (stages 1-4) exhibited an accuracy of 94.8% and 94.5% on the training data set and test data set, respectively, and AUC of 0.98 in distinguishing between healthy and NSCLC individuals. FIG. 44 illustrates a receiver-operating-characteristic (ROC) curve/area under curve (AUC) plot 1500, depicting that the regularized regression model (e.g., LASSO regression model) trained and evaluated on the training data set and test data set splits for early-stage NSCLC (stages 1-2) exhibited an accuracy of 91.7% and 92.7% on the training data set and test data set, respectively, and AUC of 0.98 in distinguishing between healthy and NSCLC individuals. FIG. 46 illustrates a receiver-operating-characteristic (ROC) curve/area under curve (AUC) plot 1700, depicting that the regularized regression model (e.g., LASSO regression model) trained and evaluated on the training data set and test data set splits for late-stage NSCLC (stages 3-4) exhibited an accuracy of 94.8% and 86.2% on the training data set and test data set, respectively, and AUC of 0.98 in distinguishing between healthy and NSCLC individuals.

TABLE 40
Peptide and glycopeptide structures where
coefficients were calculated for a model predicting probability
of having NSCLC based on control vs stages 1-4

| | | | Glycan | Glycan | |
|---|---|---|---|---|---|
| | | | Linking | Linking | |
| | | | Site | Site | |
| SEQ | Peptide | | Pos. in | Pos. in | Glycan |
| ID | Structure | Peptide | Peptide | Protein | Structure |
| NO | (PS) NAME | Sequence | Sequence | Sequence | GL NO. |
| 229 | AACT_271_6513 | YTGNASAL | 4 | 271 | 6513 |
| | | FILPDQDK | | | |
| 231 | C1S_174_5402 | NCGVNCSG | 5 | 174 | 5402 |
| | | DVFTALIG | | | |
| | | EIASPNYP | | | |
| | | KPYPENSR | | | |
| 232 | CFAI_70_5402 | NGTAVCAT | 1 | 70 | 5402 |
| | | NR | | | |
| 233 | CO5_741_5401 | ANISHK | 2 | 741 | 5401 |
| 234 | FETUA_176_5402 | AALAAFNA | 11 | 176 | 5402 |
| | | QNNGSNFQ | | | |
| | | LEEISR | | | |
| 236 | HEMO_187_6513 | SWPAVGNC | 7 | 187 | 6513 |
| | | SSALR | | | |
| 239 | HPT_184_6502 | MVSHHNLT | 6 | 184 | 6502 |
| | | TGATLINE | | | |
| | | QWLLTTAK | | | |
| 241 | IC1_238_5402 | DTFVNASR | 5 | 238 | 5402 |
| 244 | IGG1_297_3510 | EEQYNSTYR | 5 | 180 | 3510 |
| 245 | IGG1_297_4500 | EEQYNSTYR | 5 | 180 | 4500 |
| 247 | IGG2_297_3500 | EEQFNSTFR | 5 | 175 | 3500 |
| 248 | IGG2_297_4410 | EEQFNSTFR | 5 | 175 | 4410 |
| 249 | IGG2_297_5410 | EEQFNSTFR | 5 | 175 | 5410 |
| 250 | KLKB1 | IYSGILNL | N/A | N/A | Non- |
| | | SDITK | | | Glycosylated |
| 251 | KLKB1_494_5410 | LQAPLNYT | 6 | 494 | 5410 |
| | | EFQKPICL | | | |
| | | PSK | | | |
| 252 | IGG3 | TPEVTCVV | N/A | N/A | Non- |
| | | VDVSHEDP | | | Glycosylated |
| | | EVQFK | | | |
| 253 | APOM | AFLLTPR | N/A | N/A | Non- |
| | | | | | Glycosylated |
| 254 | B2M | VNHVTLSQ | N/A | N/A | Non- |
| | | PK | | | Glycosylated |
| 255 | SEPP1 | VSLATVDK | N/A | N/A | Non- |
| | | | | | Glycosylated |

[1462] This result demonstrates that the identified peptide structures in Table 35 and a trained model using the peptide structures can be used to diagnose NSCLC.

### Example 7: Glycoproteomics as Liquid Biopsy-Based Predictor of Checkpoint-Inhibitor Treatment Response in Patients with Metastatic Malignant Melanoma

[1463] Protein glycosylation is one of the most abundant and most complex form of post-translational protein modification. Glycosylation affects protein structure, conformation, and function. The elucidation of the potential role of differential protein glycosylation as biomarkers has so far been limited by the technical complexity of generating and interpreting this information. A novel, powerful platform has been recently established that combines ultra-high-performance liquid chromatography coupled to triple quadrupole mass spectrometry with a proprietary machine-learning and neural-network-based data processing engine that allows for high-throughput, highly scalable interrogation of the glycoproteome. This study assessed whether glycoproteomic biomarkers and signatures can predict which patients with metastatic malignant melanoma would respond to PD1/PDL1 checkpoint inhibitors.

[1464] Methods: this platform we interrogated 413 individual glycopeptide (GP) signatures derived from 69 abundant serum proteins in pretreatment blood samples from a cohort of 36 individuals (11 females, 25 males, age range 28 to 90 years) with metastatic malignant melanoma treated either with nivolumab plus ipilimumab (12 patients) or pembrolizumab (24 patients). Plasma samples were taken prior to beginning treatment, stored at −80C, and run through InterVenn's targeted MRM panel.

[1465] The individual glycopeptide expression levels were associated with time from treatment initiation to progression/metastasis (progression-free survival, PFS) or death (overall survival, OS) in the patient cohorts.

[1466] In addition to assessing individual biomarker associations, multivariable models were built to predict PFS (Melanoma). The multivariate models were built by selecting a small subset of glycopeptides for modeling, proceeding to build a model with n-1 patients, predicting a survival score on the one holdout patient, and iterating over all patients as individual holdouts, to generate unbiased prediction scores for everyone (a leave-one-out cross-validation approach, LOOCV). The resulting scores were dichotomized at a cutoff which optimizes Harrell's C-index, and Kaplan-Meier (KM) curves were plotted.

[1467] Specifically, progression-free survival (PFS) data with follow-up of up to 3.7 years (median: 0.8 years) were used as clinical endpoint phenotype against which the predictive power of differential abundance of GPs was assessed. PFS data were analyzed using Cox Proportional Hazards models. Kaplan Meier curves were generated for GP markers that showed statistically significant differential abundances using a false discovery rate (FDR)—adjusted p-value of ≤0.1 as a cutoff. Hazard Ratio (HR) for PFS was calculated from a Cox Proportional Hazards model, representing the multiplicative increase in odds of progression for each increase of the biomarker by 1 unit. The p-value associated with the HR was analyzed, where p<0.01 was considered significant. The interaction p-value, the p-value associated with the biomarker x treatment interaction, was also analyzed, where significance indicates potential for use in treatment selection.

[1468] Further, as part of this example, an interrogation of 526 glycopeptide (GP) signatures derived from 75 serum proteins in pretreatment blood samples from a cohort of 205 individuals (66 females, 139 males, age range 24 to 97 years) with metastatic malignant melanoma treated either with nivolumab (N) with or without ipilimumab (I, 95 patients) or pembrolizumab (P, 110 patients) immune-checkpoint inhibitor (ICI) therapy.

[1469] In certain embodiments, FIGS. 73A and 73B illustrate the KM curves for a multivariable model, including the training phases and validation phases, respectively. Hazard ratios and p-values on the plots are representative of the high/low split at the risk score cut-off determined by optimizing for sensitivity for non-response. Study 1 KM curve of FIG. 73B labeled “Validation” contains patients from the validation and test data sets. In one example, the optimal model includes 6 biomarkers and a cutoff was selected in the validation set to optimize for sensitivity to response (e.g., test set 720 day performance: sensitivity=99.5%, specificity=25.6%) metrics/curves shown exclude Indeterminate calls (10% of patient set).

[1470] Results: 27 GPs with abundance differences at FDR p<0.1 were identified, and among them 8 markers at p<0.001. Using the latter 8 markers, a multivariable model for PFS was created by generating leave-one-out cross-validation (LOOCV) scores and determining an optimized cutoff value for these scores using Harrel's concordance index. Dichotomizing the LOOCV scores using this cutoff value demonstrated the model to yield a hazard ratio of 9.2 at a p-value of 10⁵ for separating treatment responders and non-responders (70% vs. 0% PFS, respectively, at 18 months based on LOOCV score above/below cutoff), as compared to a hazard ratio of 1.5, p=0.5 for PDL1 expression. FIG. 1 shows a Kaplan-Meier curve of patients with metastatic melanoma treated either with a combination of ipilimumab and nivolumab or pembrolizumab alone, where progression-free survival (PFS) was 61% at 2.7 years in the Low Score group (black) as compared to PFS of 50% at 0.10 years in the High Score group (blue).

[1471] In an optimized assay containing 27 glycopeptides and 20 non-glycosylated peptides, we identified 14 GPs with abundance differences at FDR q≤0.05 with regard to PFS. Using 40% of the cohort as a training set and selecting 12 glycopeptide and non-glycosylated peptide biomarker features of the 47 total by LASSO shrinkage, we created a multivariable-model-based classifier for PFS that yielded a hazard ratio (HR) for prediction of likely ICI benefit of 7.5 at p<0.0001. This classifier was validated in the test set comprised of the held-out 60% of patients, yielding a HR of 4.7 at a similar p-value for separating patients likely benefiting from either single or combination ICI therapy and those likely not benefiting (50% PFS of 18 months vs. 3 months based on classifier score above/below cutoff). This classifier has a sensitivity of >99% to predict likely ICI benefit, while still performing at a specificity of 26%, thus helping to safely reduce ultimately unnecessary and non-beneficial exposure to these agents of one in four who otherwise would unnecessarily be exposed to them.

[1472] Conclusions: Our results indicate that glycoproteomics holds a strong promise as a response predictor to checkpoint inhibitor treatment that appears to significantly outperform other currently pursued biomarker approaches in this context.

### Example 8: Blood-Based Glycoprotein Signatures in Patients with Advanced Non-Small-Cell Lung Carcinoma (NSCLC) Receiving First-Line Immune Checkpoint Blockade

[1473] Background: Immune checkpoint blockade is an integral component of first-line therapy for most patients with advanced non-small cell lung cancer (NSCLC), however individual patient outcomes are highly variable and improved biomarkers are needed. Protein glycosylation is an emerging mechanism of immune evasion in cancer. Blood-based glycopeptide signatures were examined in a cohort of advanced NSCLC patients treated with first-line immune checkpoint blockade. This study assessed whether glycoproteomic biomarkers and signatures can predict which patients with NSCLC would respond to PD1/PDL1 checkpoint inhibitors.

[1474] Methods: In two independent studies, whether glycoproteomic biomarkers and signatures may predict which patients would respond to checkpoint inhibitor therapies was determined. For example, Study 1 included of n=205 patients with metastatic melanoma seen at Massachusetts General Hospital (MGH), treated either with Ipilimumab+Nivolumab (n=95) or Pembrolizumab (n=110). Plasma samples were taken prior to beginning treatment, stored at −80C, and inputted to a targeted multiple reaction monitoring (MRM) panel. Study 2 included n=125 patients with metastatic non-small-cell lung cancer sourced from Tempus and treated with Pembrolizumab. Serum samples were taken prior to beginning treatment, stored at −80C, and inputted to the targeted MRM panel. In both Study 1 and Study 2, individual glycopeptide expression levels were associated with time from treatment initiation to progression-free survival (PFS) (e.g., progression/metastasis) or overall survival (OS) in the patient cohorts.

[1475] In addition to assessing individual biomarker associations, multivariable models were built to predict OS (NSCLC) and PFS (Melanoma). The multivariable models were built to predict OS (NSCLC) and PFS (Melanoma) by selecting a small subset of glycopeptides through 5-fold repeated cross-validated LASSO regularization, proceeding to build a model with 40% of patients (allocated via balanced stratification on sex, age quartile, PFS/OS event), tuning hyperparameters in LASSO model in another 30% of patients, and predicting a survival score on the remaining 30% of holdout patients (to generate unbiased prediction scores). The resulting prediction scores were dichotomized at a cutoff which optimizes Harrell's C-index, and Kaplan-Meier (KM) curves were plotted final models for products were optimized for sensitivity for non-response. For example, in certain embodiments, FIGS. 74A and 74B illustrate the KM curves for a multivariable model, including the training phases and validation phases, respectively. Hazard ratios and p-values on the plots are representative of the high/low split at the risk score cut-off determined by optimizing for sensitivity for non-response. Study 2 KM curve of FIG. 74B labeled “Validation” contains patients only from the independent/unseen test set since there was no validation set. In one example, the optimal model includes 6 biomarkers and a cutoff was selected in the validation set to optimize for sensitivity to response (e.g., test set 720 day performance: sensitivity=99.5%, specificity=25.6%) metrics/curves shown exclude Indeterminate calls (10% of patient set).

[1476] Results: 30 GPs with abundance differences using a False Discovery Rate (FDR) threshold of 0.05 were identified. Using the 5 most predictive GP markers, a multivariable model for OS was created by generating leave-one-out cross-validation (LOOCV) scores and determining an optimized cutoff value of −0.83 (range: −2.2-3.4) for these scores using Harrell's concordance index. The median overall survival was 2.8 years for patients (n=14) whose GP classifier value was above the cutoff and 0.8 years for patients (n=32) whose GP classifier value was below the cutoff (HR 7.4, 95% CI 1.7-32.1, p=0.007). The model's performance was not affected by sex, age, or treatment regimen.

[1477] Conclusions: Blood-based glycopeptide signatures may represent novel, non-invasive biomarkers of clinical outcome to first-line immune checkpoint blockade in advanced NSCLC. These findings may be validated in larger cohorts and applied in clinical decision-making.

### Example 9: Blood-Based Glycoprotein Signatures in Patients with Unresectable Non-Small-Cell Lung Carcinoma (NSCLC) Treated with Immune Checkpoint Inhibitors

[1478] Serum samples were taken pre-treatment from a cohort of 62 patients from Northwestern Memorial Hospital with unresectable NSCLC. The samples were processed in accordance with the combined LC-MS methods described herein followed by AI-driven data analysis, which yielded 20 glycopeptide biomarkers strongly associated with progression of disease (Tables 58A.1 and 58A.2) and 20 glycopeptide biomarkers strongly associated with death (Tables 58B.1 and 58B.2) in this cohort.

### Example 10: Blood-Based Glycoprotein Signatures in Patients with Advanced Non-Small-Cell Lung Carcinoma (NSCLC) Receiving First-Line Immune Checkpoint Blockad

### BACKGROUND

[1479] Immune checkpoint blockade is an integral component of first-line therapy for most patients with advanced non-small-cell lung cancer (NSCLC), however individual patient outcomes are highly variable and improved biomarkers are needed. Protein glycosylation is an emerging mechanism of immune evasion in cancer. Protein glycosylation is the most abundant and complex form of post-translational protein modification. Glycosylation profoundly affects protein structure, conformation, and function. The elucidation of the potential role of differential protein glycosylation as biomarkers has been limited by the technical complexity of generating and interpreting this information. Blood-based glycopeptide signatures were examined in a cohort of advanced NSCLC patients treated with first-line immune checkpoint blockade. This study assessed whether glycoproteomic biomarkers and signatures can predict which patients with NSCLC would respond to pembrolizumab.

[1480] Methods: A study was conducted to determine whether glycoproteomic biomarkers and signatures may predict which patients would respond to checkpoint inhibitor therapies. The study included n=125 patients (54 females, 71 males, age range 60 to 75 years) with metastatic non-small-cell lung cancer (NSCLC) sourced from Tempus and treated with Pembrolizumab. Inclusion criteria were as follows: a diagnosis of unresectable stage 3 or 4 NSCLC, treatment with pembrolizumab monotherapy (27 patients), or treatment with combination pembrolizumab-chemotherapy (98 patients). Serum samples were taken prior to beginning treatment, stored at −80C, and inputted to the targeted MRM panel. Individual glycopeptide expression levels were associated with time from treatment initiation to overall survival (OS) in the patient cohorts.

[1481] In addition to assessing individual biomarker associations, a multivariable model was built to predict OS. The multivariable model was built to predict OS by selecting a small subset of glycopeptides through 5-fold repeated cross-validated elastic net and LASSO regularization, proceeding to build a generalized additive model (GAM) with 40% of patients (allocated via balanced stratification on sex, age quartile, OS event), tuning hyperparameters of the GAM in another 30% of patients, and predicting a survival score on the remaining 30% of holdout patients (to generate unbiased prediction scores). The resulting prediction scores were dichotomized at a cutoff which optimizes Harrell's C-index, and Kaplan-Meier (KM) curves were plotted final models for products were optimized for sensitivity for non-response. For example, in certain embodiments, FIGS. 147A and 147B illustrate the KM curves for a multivariable model, including the training phases and validation phases, respectively. Hazard ratios and p-values on the plots are representative of the high/low split at the risk score cut-off determined by optimizing for sensitivity for non-response. The KM curve of FIG. 147B labeled “Validation” contains patients only from the independent/unseen test set since there was no validation set. In one example, the optimal model includes 7 biomarkers and a cutoff was selected in the validation set to optimize for hazard ratio metrics. The curves shown exclude Indeterminate calls (10% of patient set). All analysis was conducted using the R 4.2.1 software package.

[1482] Results: 23 peptides and 49 glycopeptides with abundance differences using a False Discovery Rate (FDR) threshold of 0.05 were identified. Using the 7 most predictive GP markers, a multivariable generalized additive model for OS was created by generating risk scores on the training set and determining an optimized cutoff value of −0.50 (range: −1.62-0.66) for these scores using Harrell's concordance index. Any sample with a generated risk score higher than the selected cutoff value was predicted to be part of the “unlikely to benefit from treatment” cohort and any sample with a generated risk score lower than the selected cutoff value was predicted to be part of the “likely to benefit from treatment” cohort. Of the 7 selected markers, 5 of the markers were adjusted for their non-linear relationships with the outcome during model training on the training set. These 5 markers correspond to SEQ ID NOs: 1003, 1004, and 1006-1008 and were adjusted for non-linearity using smoothing splines with 9 spline basis functions for each non-linear feature. The 2 markers corresponding to SEQ ID NOs: 1002 and 1005 were treated linearly. The hyperparameters for the optimized model are provided in Table 83. The median overall survival was 5.8 months for patients (n=8) whose GP classifier value was above the cutoff and 23.16 months for patients (n=29) whose GP classifier value was below the cutoff (HR 3.858, 95% CI 1.86-15.83, p=0.005). The model's performance was not affected by sex, age, or treatment regimen. In some embodiments, a hazard ratio of >3 indicates that the model has a good fit and strong performance comparing the “likely to benefit from treatment” cohort versus the “unlikely to benefit from treatment” cohort. It should be noted that the hazard ratios (HR) are similar in magnitude for both the training and testing datasets (FIGS. 147A and 147B, respectively), which implies that the model was not overfit.

TABLE 83
Hyperparameters for generalized additive model

| SEQ ID | | |
|---|---|---|
| NO. | Spline No. | Coefficient |
| 1002 | N/A (linear term) | −4.0391 |
| 1003 | 1 | −3.7E−07 |
| 1003 | 2 | 2.53E−07 |
| 1003 | 3 | −4.3E−07 |
| 1003 | 4 | 7.79E−07 |
| 1003 | 5 | −3.3E−07 |
| 1003 | 6 | −7.1E−07 |
| 1003 | 7 | 3.85E−07 |
| 1003 | 8 | −4.5E−06 |
| 1003 | 9 | 0.594069 |
| 1004 | 1 | 2.16E−06 |
| 1004 | 2 | 2.85E−06 |
| 1004 | 3 | 2.54E−06 |
| 1004 | 4 | 7.21E−06 |
| 1004 | 5 | −2.6E−06 |
| 1004 | 6 | −5.7E−06 |
| 1004 | 7 | 2.14E−06 |
| 1004 | 8 | −4.1E−05 |
| 1004 | 9 | −1.02837 |
| 1005 | N/A (linear term) | 0.156552 |
| 1006 | 1 | −0.00058 |
| 1006 | 2 | 0.002245 |
| 1006 | 3 | 0.000918 |
| 1006 | 4 | 0.003106 |
| 1006 | 5 | −0.00156 |
| 1006 | 6 | −0.0027 |
| 1006 | 7 | 0.0017 |
| 1006 | 8 | −0.01733 |
| 1006 | 9 | 0.956383 |
| 1007 | 1 | 1.13E−06 |
| 1007 | 2 | −1.3E−06 |
| 1007 | 3 | −6.4E−08 |
| 1007 | 4 | 1.23E−06 |
| 1007 | 5 | 4.64E−08 |
| 1007 | 6 | 1.2E−06 |
| 1007 | 7 | −8.5E−08 |
| 1007 | 8 | −7.6E−06 |
| 1007 | 9 | 0.165953 |
| 1008 | 1 | 3.37E−06 |
| 1008 | 2 | 3.24E−06 |
| 1008 | 3 | −6.2E−07 |
| 1008 | 4 | −1.5E−06 |
| 1008 | 5 | −4E−08 |
| 1008 | 6 | −1.3E−06 |
| 1008 | 7 | 2.95E−08 |
| 1008 | 8 | −6.4E−06 |
| 1008 | 9 | −0.03973 |

[1483] Conclusions: The glycoproteomic-based classifier described here predicts with high sensitivity which patients are likely to benefit from ICI therapy. In addition to potentially reducing the use of ICIs in a safe manner in patients who would be unnecessarily subjected to possible adverse drug reactions, this classifier simultaneously has the potential of reducing the burden of health care expenditures. The presented results indicate that glycoproteomics holds a strong promise as a predictor for ICI treatment benefit that appears to significantly outperform other currently pursued biomarker approaches. Blood-based glycopeptide signatures may represent novel, non-invasive biomarkers of clinical outcome to first-line immune checkpoint blockade in advanced NSCLC. These findings may be validated in larger cohorts and applied in clinical decision-making as contemplated above.

### Example 11: Diagnostic Testing to Indicate Lack of Benefit from ICI Therapy for Subjects with Malignant Melanoma Before and After ICI Therapy

[1484] A diagnostic test was performed using a composite of two risk prediction models that were used to calculate two mean risk scores. In general, a higher risk score indicates that a subject is less likely to benefit from ICI therapy and a lower risk score indicates that a subject is more likely to benefit from ICI therapy. FIG. 148 illustrated the mean risk scores of the first prediction model, referred to as DAWN ViA, as a function of time after the ICI treatment. Similarly, FIG. 149 illustrated the mean risk scores of the second prediction model, referred to as DAWN V1B, as a function of time after the ICI treatment. In FIGS. 148 and 149, the term “Mean Dawn Score” was referred to as a mean risk score. With respect to the ICI treatment used in FIGS. 84 and 85, it represented either ipilimumab/nivolumab (ipi/nivo) treatment or pembrolizumab (pembro) treatment. The time points of the subjects for FIGS. 148 and 149 were a) baseline (BL) at or just before the start of ICI treatment, b) follow-up 1 (FU1) around 6 weeks post-BL, and c) follow-up 2 (FU2) around 6 months post-BL. The subjects of this Example were divided, based on the observed data, into 3 cohorts that were labeled as early failure (EF), sustained control (SC), and “Other”. The subjects of EF cohort progressed and died within a year of starting the ICI treatment. The subjects of the SC cohort remained alive and progression-free for at least three years after treatment start. The subjects of the “Other” cohort could not be labeled as either of EF or SC.

[1485] Referring back to FIGS. 148 and 149, the trends in the mean risk scores for the first prediction model and the second prediction model generally showed a similar pattern. The EF cohort showed an increase in mean risk scores in the first 6 weeks and remained elevated for the subsequent time point. The SC cohort showed a relatively low risk scores at BL along with relatively no change at FU1 and a modest decrease in mean risk scores at FU2. The “Other” cohort showed an intermediate mean risk score at BL followed by a relatively small change at FU1 and FU2. For reference, Table 84 showed the sample size for each cohort of EF, “Other”, and SC at the time points BL, FU1, and FU2 that correspond to FIGS. 148 and 149.

TABLE 84
Sample Size of the EF, “Other”, SC Cohorts and Various
Time Points in Accordance with FIGS. 148 and 149

| | BL | FU1 | FU2 |
|---|---|---|---|
| EF | 43 | 35 | 24 |
| Other | 70 | 65 | 68 |
| SC | 41 | 35 | 37 |

[1486] Table 85 showed the hazard ratios (HR) and p-values associated with the progression of malignant melanoma for both the first and second risk model when comparing various combination of time points (e.g., FU1 and BL; FU2 and BL; and FU2 and FU1). It should be noted that a positive difference in risk score between FU1 and BL was associated with disease progression.

TABLE 85
Cox proportional hazards regression modeling
based on progression of malignant melanoma
Progression of Malignant Melanoma

| | |
|---|---|
| Model V1A | Model V1B |

| | HR | P-value | HR | P-value |
|---|---|---|---|---|
| Δ(FU1, BL) | 6.735 | 0.001 | 3.140 | 0.002 |
| Δ(FU2, BL) | 3.649 | 0.130 | 1.836 | 0.237 |
| Δ(FU2, FU1) | 6.010 | 0.076 | 1.990 | 0.190 |

[1487] Table 86 showed the hazard ratios (HR) and p-values associated with the death of the subjects having malignant melanoma for both the first and second risk model when comparing various combination of time points (e.g., FU1 and BL, FU2 and BL, and FU2 and FU1). A positive difference in risk score between any two time points was associated with death. Cox proportional hazards regression modeling showed an increase of risk scores at follow-up time points and are associated with progression and death. It should be noted that regression analyses were adjusted for age and sex.

TABLE 86
Cox proportional hazards regression modeling
based on death of subject having malignant melanoma
Death of Subject Having Malignant Melanoma

| | |
|---|---|
| Model V1A | Model V1B |

| | HR | P-value | HR | P-value |
|---|---|---|---|---|
| Δ(FU1, BL) | 8.428 | <0.001 | 3.264 | <0.001 |
| Δ(FU2, BL) | 4.316 | <0.001 | 2.114 | 0.003 |
| Δ(FU2, FU1) | 5.606 | 0.001 | 2.106 | 0.016 |

[1488] FIG. 150 illustrated the mean risk scores of the first prediction model (DAWN ViA) as a function of time after the specific ICI treatment combination therapy of ipilimumab (ipi) and nivolumab (nivo). Similarly, FIG. 151 illustrated the mean risk scores of the first prediction model (DAWN V1B), as a function of time after the specific ICI treatment therapy of pembrolizumab (pembro). Referring back to FIGS. 150 and 151, the trends in the mean risk scores for the ipi/nivo ICI treatment therapy and the pembro ICI treatment therapy generally showed a similar pattern. However, the ipi/nivo treatment group showed that the subjects who were part of the EF cohort had mean risk scores that showed a plateau after 6 weeks rather than a continued increase, while the “Other” and SC cohorts on ipi/nivo had a decrease in mean risk scores after six weeks (FU1). For reference, Table 87 showed the sample size for the ipi/nivo ICI treatment group that had the cohorts of EF, “Other”, and SC at the time points BL, FU1, and FU2. Table 88 showed the sample size for the pembro ICI treatment group that had the cohorts of EF, “Other”, and SC at the time points BL, FU1, and FU2. This Example showed that the diagnostic test can calculate a risk score for predicting the likelihood of benefit for ICI before therapy is administered. In addition to predicting the likelihood of ICI treatment benefit before therapy is administered, this diagnostic test can be used with subjects after they have started receiving ICI treatment (such as 6 weeks to 6 months after the start of ICI therapy). Alternatively, the risk score of can be measured at various time intervals during ICI treatment and used as a monitoring tool during ICI treatment so that a physician can make an informed decision about whether to continue, cease, or change the dose of the ICI treatment.

TABLE 87
Sample Size of the Ipi/nivo ICI treatment group
along with various cohorts and time points

| | BL | FU1 | FU2 |
|---|---|---|---|
| EF | 22 | 16 | 10 |
| Other | 33 | 31 | 28 |
| SC | 20 | 18 | 19 |

TABLE 88
Sample Size of the Pembro ICI treatment group
along with various cohorts and time points

| | BL | FU1 | FU2 |
|---|---|---|---|
| EF | 21 | 19 | 14 |
| Other | 37 | 34 | 40 |
| SC | 21 | 17 | 18 |

### 4. Additional Considerations

[1489] Any headers and/or subheaders between sections and subsections of this document are included solely for the purpose of improving readability and do not imply that features cannot be combined across sections and subsection. Accordingly, sections and subsections do not describe separate embodiments.

[1490] While the present teachings are described in conjunction with various embodiments, it is not intended that the present teachings be limited to such embodiments. On the contrary, the present teachings encompass various alternatives, modifications, and equivalents, as will be appreciated by those of skill in the art. The present description provides preferred exemplary embodiments, and is not intended to limit the scope, applicability, or configuration of the disclosure. Rather, the present description of the preferred exemplary embodiments will provide those skilled in the art with an enabling description for implementing various embodiments.

[1491] It is understood that various changes may be made in the function and arrangement of elements without departing from the spirit and scope as set forth in the appended claims. Thus, such modifications and variations are considered to be within the scope set forth in the appended claims. Further, the terms and expressions which have been employed are used as terms of description and not of limitation, and there is no intention in the use of such terms and expressions of excluding any equivalents of the features shown and described or portions thereof, but it is recognized that various modifications are possible within the scope of the invention claimed.

[1492] In describing the various embodiments, the specification may have presented a method and/or process as a particular sequence of steps. However, to the extent that the method or process does not rely on the particular order of steps set forth herein, the method or process should not be limited to the particular sequence of steps described, and one skilled in the art can readily appreciate that the sequences may be varied and still remain within the spirit and scope of the various embodiments.

[1493] Some embodiments of the present disclosure include a system including one or more data processors. In some embodiments, the system includes a non-transitory computer readable storage medium containing instructions which, when executed on the one or more data processors, cause the one or more data processors to perform part or all of one or more methods and/or part or all of one or more processes disclosed herein. Some embodiments of the present disclosure include a computer-program product tangibly embodied in a non-transitory machine-readable storage medium, including instructions configured to cause one or more data processors to perform part or all of one or more methods and/or part or all of one or more processes disclosed herein.

[1494] Specific details are given in the present description to provide an understanding of the embodiments. However, it is understood that the embodiments may be practiced without these specific details. For example, circuits, systems, networks, processes, and other components may be shown as components in block diagram form in order not to obscure the embodiments in unnecessary detail. In other instances, well-known circuits, processes, algorithms, structures, and techniques may be shown without unnecessary detail in order to avoid obscuring the embodiments.

1.-54. (canceled)

55. A method of detecting a presence of one of a plurality of states associated with fatty liver disease (FLD) progression in a biological sample, the method comprising:
receiving peptide structure data corresponding to a set of glycoproteins and/or non-glycosylated peptides in the biological sample obtained from a subject;
analyzing the peptide structure data using at least one supervised machine learning model to generate a disease indicator based on at least 2 peptide structures selected from a group of peptide structures identified in Table 1A; and
detecting the presence of a corresponding state of the plurality of states associated with the FLD progression in response to a determination that the disease indicator falls within a selected range associated with the corresponding state.

56. The method of claim 55, wherein a peptide structure of the at least 2 peptide structures comprises a non-glycosylated peptide or a glycopeptide structure defined by a peptide sequence and a glycan structure linked to the peptide sequence at a linking site of the peptide sequence, as identified in Table 1A, with the peptide sequence being one of SEQ ID NOS: 1-23 as defined in Table 1A.

57. The method of claim 55, wherein the at least one supervised machine learning model comprises a logistic regression model; or
wherein the at least one supervised machine learning model comprises a penalized multivariable logistic regression model.

58.-59. (canceled)

60. The method of claim 59, wherein the peptide structure data comprises quantification data; and
wherein the quantification data comprises at least one of an abundance, a relative abundance, a normalized abundance, a relative quantity, an adjusted quantity, a normalized quantity, a relative concentration, an adjusted concentration, or a normalized concentration.

61. (canceled)

62. The method of claim 55, wherein the disease indicator is a probability score.

63. The method of claim 55, further comprising:
generating a report that includes a diagnosis based on the corresponding state detected for the subject.

64. The method of claim 55, wherein the plurality of states includes a non-alcoholic steatohepatitis (NASH) state, a non-NASH state, or a stage of NASH state;
wherein the non-NASH state comprises at least one of a healthy state or a liver disease-free state; and
wherein the stage of the NASH state is early stage NASH or late stage NASH.

65.-66. (canceled)

67. The method of claim 55, wherein analyzing of the peptide structure data comprises: computing a peptide structure profile for the biological sample that identifies a weighted value for each peptide structure of the at least 2 peptide structures, wherein the weighted value for a peptide structure of the at least 2 peptide structures is a product of a quantification metric for the peptide structure identified from the peptide structure data and a weight coefficient for the peptide structure; and computing the disease indicator using the peptide structure profile.

68. The method of claim 55, wherein the corresponding state is non-alcoholic steatohepatitis (NASH) state and the selected range associated with the NASH state is between 0.05 and 0.4.

69. The method of claim 55, further comprising: creating a sample from the biological sample; and preparing the sample using reduction, alkylation, and enzymatic digestion to form a prepared sample that includes a set of peptide structures;
generating the peptide structure data from the prepared sample using multiple reaction monitoring mass spectrometry (MRM-MS); or
generating the peptide structure data from the prepared sample using liquid chromatography/mass spectrometry (LC/MS); and
wherein the biological sample comprises at least one of blood, serum, or plasma.

70.-73. (canceled)

74. The method of claim 55, further comprising: generating a treatment output based on the disease indicator.

75. The method of claim 74, wherein the treatment output comprises at least one of an identification of a treatment to treat the subject, a design for the treatment, a manufacturing plan for the treatment, or a treatment plan for administering the treatment.

76. A method of detecting a presence of one of a plurality of states associated with fatty liver disease (FLD) progression in a biological sample, the method comprising:
receiving peptide structure data corresponding to a set of glycoproteins and/or non-glycosylated peptides in the biological sample obtained from a subject;
analyzing the peptide structure data using at least one supervised machine learning model to generate a disease indicator based on at least 2 peptide structures selected from a group of peptide structures identified in Table 1B; and
detecting the presence of a corresponding state of the plurality of states associated with the FLD progression in response to a determination that the disease indicator falls within a selected range associated with the corresponding state.

77. The method of claim 76, wherein a peptide structure of the at least 2 peptide structures comprises a non-glycosylated peptide or a glycopeptide structure defined by a peptide sequence and a glycan structure linked to the peptide sequence at a linking site of the peptide sequence, as identified in Table 1B, with the peptide sequence being one of SEQ ID NOS: 1-11 as defined in Table 1B.

78. The method of claim 76, wherein the at least one supervised machine learning model comprises a logistic regression model; or
wherein the at least one supervised machine learning model comprises a penalized multivariable logistic regression model.

79.-80. (canceled)

81. The method of claim 80, wherein the peptide structure data comprises quantification data:
wherein the quantification data comprises at least one of an abundance, a relative abundance, a normalized abundance, a relative quantity, an adjusted quantity, a normalized quantity, a relative concentration, an adjusted concentration, or a normalized concentration; and
wherein the disease indicator is a probability score.

82.-83. (canceled)

84. The method of claim 76, further comprising:
generating a report that includes a diagnosis based on the corresponding state detected for the subject.

85. The method of claim 76, wherein the plurality of states includes one or more stages of a non-alcoholic steatohepatitis (NASH) state, or a non-NASH state that comprises at least one of a healthy state or a liver disease-free state; and
wherein the one or more stages of the NASH state includes a stage that is F1/F2 stage, or that is F3/F4 stage.

86.-88. (canceled)

89. A method of classifying a biological sample as corresponding to one of a plurality of states associated with fatty liver disease (FLD) progression, the method comprising:
training at least one supervised machine learning model using training data, wherein the training data comprises a plurality of peptide structure profiles for a plurality of training subjects and identifies a state of the plurality of states for each peptide structure profile of the plurality of peptide structure profiles;
receiving peptide structure data corresponding to a set of non-glycosylated peptides and/or glycopeptides in the biological sample obtained from a subject; inputting quantification data identified from the peptide structure data for a set of peptide structures into the supervised machine learning model that has been trained, wherein the set of peptide structures includes at least one peptide structure identified in Table 1A;
analyzing the quantification data using the supervised machine learning model to generate a score;
determining that the score falls within a selected range associated with a corresponding state of the plurality of states associated with the FLD progression; and
generating a diagnosis output that indicates that the biological sample evidences the corresponding state, wherein the plurality of states includes a non-alcoholic steatohepatitis (NASH) state or a non-NASH state.

90. The method of claim 89, further defined as:
training a supervised machine learning model using training data, wherein the training data comprises a plurality of peptide structure profiles for a plurality of training subjects and identifies a state of the plurality of states for each peptide structure profile of the plurality of peptide structure profiles;
receiving peptide structure data corresponding to a set of non-glycosylated peptides and/or glycopeptides in the biological sample obtained from a subject; inputting quantification data identified from the peptide structure data for a set of peptide structures into the supervised machine learning model that has been trained, wherein the set of peptide structures includes at least one peptide structure identified in Table 1B;
analyzing the quantification data using the supervised machine learning model to generate a score;
determining that the score falls within a selected range associated with a corresponding state of the plurality of states associated with the FLD progression; and
generating a diagnosis output that indicates that the biological sample evidences the corresponding state, wherein the plurality of states includes a non-alcoholic steatohepatitis (NASH) state or a non-NASH state.

91.-690. (canceled)

The application's sequence listing, which the Patent Office published only in electronic form, follows.

SEQUENCE LISTING (1022 sequences)

SEQ ID NO: 1 - protein, 16 aa, synthetic construct
  CARBOHYD 4: note = N is linked to the N-linked glycan structure Hex(5)HexNAc(4)Fuc(0)NeuAc(2)
YLGNATAIFFLPDEGK

SEQ ID NO: 2 - protein, 19 aa, synthetic construct
  CARBOHYD 3: note = N is linked to the N-linked glycan structure Hex(5)HexNAc(4)Fuc(0)NeuAc(2)
VSNQTLSLFFTVLQDVPVR

SEQ ID NO: 3 - protein, 16 aa, synthetic construct
  CARBOHYD 4: note = N is linked to the N-linked glycan structure Hex(7)HexNAc(6)Fuc(0)NeuAc(2)
YTGNASALFILPDQDK

SEQ ID NO: 4 - protein, 16 aa, synthetic construct
  CARBOHYD 15: note = N is linked to the N-linked glycan structure Hex(7)HexNAc(6)Fuc(0)NeuAc(4)
SVQEIQATFFYFTPNK

SEQ ID NO: 5 - protein, 17 aa, synthetic construct
  CARBOHYD 9: note = N is linked to the N-linked glycan structure Hex(5)HexNAc(4)Fuc(0)NeuAc(1)
FEVDSPVYNATWSASLK

SEQ ID NO: 6 - protein, 19 aa, synthetic construct
  CARBOHYD 14: note = T is linked to the O-linked glycan structure Hex(1)HexNAc(1)Fuc(0)NeuAc(1)
FSEFWDLDPEVRPTSAVAA

SEQ ID NO: 7 - protein, 14 aa, synthetic construct
  CARBOHYD 1: note = S is linked to the O-linked glycan structure Hex(2)HexNAc(2)Fuc(0)NeuAc(2)
SSTTKPPFKPHGSR

SEQ ID NO: 8 - protein, 27 aa, synthetic construct
  CARBOHYD 18: note = N is linked to the N-linked glycan structure Hex(4)HexNAc(4)Fuc(0)NeuAc(1)
LSLHRPALEDLLLGSEANLTCTLTGLR

SEQ ID NO: 9 - protein, 9 aa, synthetic construct
  CARBOHYD 5: note = N is linked to the N-linked glycan structure Hex(5)HexNAc(4)Fuc(1)NeuAc(0)
  CARBOHYD 5: note = N is linked to the N-linked glycan structure Hex(4)HexNAc(4)Fuc(1)NeuAc(0)
  CARBOHYD 5: note = N is linked to the N-linked glycan structure Hex(3)HexNAc(5)Fuc(0)NeuAc(0)
  CARBOHYD 5: note = N is linked to the N-linked glycan structure Hex(4)HexNAc(5)Fuc(0)NeuAc(0)
  CARBOHYD 5: note = N is linked to the glycan structure Hex(3)HexNAc(3)Fuc(1)NeuAc(0)
EEQFNSTFR

SEQ ID NO: 10 - protein, 12 aa, synthetic construct
  CARBOHYD 6: note = N is linked to the N-linked glycan structure Hex(5)HexNAc(4)Fuc(0)NeuAc(2)
LQAPLNYTEFQK

SEQ ID NO: 11 - protein, 13 aa, synthetic construct
FATTFYQHLADSK

SEQ ID NO: 12 - protein, 21 aa, synthetic construct
TVVQPSVGAAAGPVVPPCPGR

SEQ ID NO: 13 - protein, 13 aa, synthetic construct
  CARBOHYD 7: note = N is linked to the N-linked glycan structure Hex(5)HexNAc(4)Fuc(0)NeuAc(1)
SWPAVGNCSSALR

SEQ ID NO: 14 - protein, 33 aa, synthetic construct
  CARBOHYD 16: note = N is linked to the N-linked glycan structure Hex(5)HexNAc(4)Fuc(0)NeuAc(2)
QVFPGLNYCTSGAYSNASSTDSASYYPLTGDTR

SEQ ID NO: 15 - protein, 15 aa, synthetic construct
  CARBOHYD 7: note = N is linked to the N-linked glycan structure Hex(7)HexNAc(6)Fuc(0)NeuAc(4)
  CARBOHYD 7: note = N is linked to the N-linked glycan structure Hex(6)HexNAc(5)Fuc(0)NeuAc(3)
QDQCIYNTTYLNVQR

SEQ ID NO: 16 - protein, 13 aa, synthetic construct
  CARBOHYD 7: note = N is linked to the N-linked glycan structure Hex(5)HexNAc(4)Fuc(0)NeuAc(2)
IYSGILNLSDITK

SEQ ID NO: 17 - protein, 7 aa, synthetic construct
  CARBOHYD 3: note = N is linked to the N-linked glycan structure Hex(5)HexNAc(4)Fuc(0)NeuAc(2)
VLNFTTK

SEQ ID NO: 18 - protein, 7 aa, synthetic construct
  CARBOHYD 4: note = N is linked to the N-linked glycan structure Hex(5)HexNAc(4)Fuc(1)NeuAc(2)
GHVNITR

SEQ ID NO: 19 - protein, 40 aa, synthetic construct
  CARBOHYD 2: note = N is linked to the N-linked glycan structure Hex(5)HexNAc(4)Fuc(0)NeuAc(2)
LNDTLDYECHDGYESNTGSTTGSIVCGYNGWSDLPICYER

SEQ ID NO: 20 - protein, 22 aa, synthetic construct
  CARBOHYD 16: note = N is linked to the N-linked glycan structure Hex(5)HexNAc(4)Fuc(0)NeuAc(2)
ADGTVNQIEGEATPVNLTEPAK

SEQ ID NO: 21 - protein, 11 aa, synthetic construct
INHGILYDEEK

SEQ ID NO: 22 - protein, 21 aa, synthetic construct
  CARBOHYD 16: note = T is linked to the O-linked glycan structure Hex(1)HexNAc(1)Fuc(0)NeuAc(2)
DKFSEFWDLDPEVRPTSAVAA

SEQ ID NO: 23 - protein, 14 aa, synthetic construct
DSHSLTTNIMEILR

SEQ ID NO: 24 - protein, 418 aa, Homo sapiens
  CARBOHYD 271: note = N is linked to the N-linked glycan structure Hex(5)HexNAc(4)Fuc(0)NeuAc(2)
MPSSVSWGILLLAGLCCLVPVSLAEDPQGDAAQKTDTSHHDQDHPTFNKITPNLAEFAFSLYRQLAHQSNSTNIFFSPVSIATAFAMLSLGTKADTHDEILEGLNFNLTEIPEAQIHEGFQELLRTLNQPDSQLQLTTGNGLFLSEGLKLVDKFLEDVKKLYHSEAFTVNFGDTEEAKKQINDYVEKGTQGKIVDLVKELDRDTVFALVNYIFFKGKWERPFEVKDTEEEDFHVDQVTTVKVPMMKRLGMFNIQHCKKLSSWVLLMKYLGNATAIFFLPDEGKLQHLENELTHDIITKFLENEDRRSASLHLPKLSITGTYDLKSVLGQLGITKVFSNGADLSGVTEEAPLKLSKAVHKAVLTIDEKGTEAAGAMFLEAIPMSIPPEVKFNKPFVFLMIEQNTKSPLFMGKVVNPTQK

SEQ ID NO: 25 - protein, 1474 aa, Homo sapiens
  CARBOHYD 1424: note = N is linked to the N-linked glycan structure Hex(5)HexNAc(4)Fuc(0)NeuAc(2)
MGKNKLLHPSLVLLLLVLLPTDASVSGKPQYMVLVPSLLHTETTEKGCVLLSYLNETVTVSASLESVRGNRSLFTDLEAENDVLHCVAFAVPKSSSNEEVMFLTVQVKGPTQEFKKRTTVMVKNEDSLVFVQTDKSIYKPGQTVKFRVVSMDENFHPLNELIPLVYIQDPKGNRIAQWQSFQLEGGLKQFSFPLSSEPFQGSYKVVVQKKSGGRTEHPFTVEEFVLPKFEVQVTVPKIITILEEEMNVSVCGLYTYGKPVPGHVTVSICRKYSDASDCHGEDSQAFCEKFSGQLNSHGCFYQQVKTKVFQLKRKEYEMKLHTEAQIQEEGTVVELTGRQSSEITRTITKLSFVKVDSHFRQGIPFFGQVRLVDGKGVPIPNKVIFIRGNEANYYSNATTDEHGLVQFSINTTNVMGTSLTVRVNYKDRSPCYGYQWVSEEHEEAHHTAYLVFSPSKSFVHLEPMSHELPCGHTQTVQAHYILNGGTLLGLKKLSFYYLIMAKGGIVRTGTHGLLVKQEDMKGHFSISIPVKSDIAPVARLLIYAVLPTGDVIGDSAKYDVENCLANKVDLSFSPSQSLPASHAHLRVTAAPQSVCALRAVDQSVLLMKPDAELSASSVYNLLPEKDLTGFPGPLNDQDNEDCINRHNVYINGITYTPVSSTNEKDMYSFLEDMGLKAFTNSKIRKPKMCPQLQQYEMHGPEGLRVGFYESDVMGRGHARLVHVEEPHTETVRKYFPETWIWDLVVVNSAGVAEVGVTVPDTITEWKAGAFCLSEDAGLGISSTASLRAFQPFFVELTMPYSVIRGEAFTLKATVLNYLPKCIRVSVQLEASPAFLAVPVEKEQAPHCICANGRQTVSWAVTPKSLGNVNFTVSAEALESQELCGTEVPSVPEHGRKDTVIKPLLVEPEGLEKETTFNSLLCPSGGEVSEELSLKLPPNVVEESARASVSVLGDILGSAMQNTQNLLQMPYGCGEQNMVLFAPNIYVLDYLNETQQLTPEIKSKAIGYLNTGYQRQLNYKHYDGSYSTFGERYGRNQGNTWLTAFVLKTFAQARAYIFIDEAHITQALIWLSQRQKDNGCFRSSGSLLNNAIKGGVEDEVTLSAYITIALLEIPLTVTHPVVRNALFCLESAWKTAQEGDHGSHVYTKALLAYAFALAGNQDKRKEVLKSLNEEAVKKDNSVHWERPQKPKAPVGHFYEPQAPSAEVEMTSYVLLAYLTAQPAPTSEDLTSATNIVKWITKQQNAQGGFSSTQDTVVALHALSKYGAATFTRTGKAAQVTIQSSGTFSSKFQVDNNNRLLLQQVSLPELPGEYSMKVTGEGCVYLQTSLKYNILPEKEEFPFALGVQTLPQTCDEPKAHTSFQISLSVSYTGSRSASNMAIVDVKMVSGFIPLKPTVKMLERSNHVSRTEVSSNHVLIYLDKVSNQTLSLFFTVLQDVPVRDLKPAIVKVYDYYETDEFAIAEYNAPCSKDLGNA

SEQ ID NO: 26 - protein, 423 aa, Homo sapiens
  CARBOHYD 271: note = N is linked to the N-linked glycan structure Hex(7)HexNAc(6)Fuc(0)NeuAc(2)
MERMLPLLALGLLAAGFCPAVLCHPNSPLDEENLTQENQDRGTHVDLGLASANVDFAFSLYKQLVLKAPDKNVIFSPLSISTALAFLSLGAHNTTLTEILKGLKFNLTETSEAEIHQSFQHLLRTLNQSSDELQLSMGNAMFVKEQLSLLDRFTEDAKRLYGSEAFATDFQDSAAAKKLINDYVKNGTRGKITDLIKDLDSQTMMVLVNYIFFKAKWEMPFDPQDTHQSRFYLSKKKWVMVPMMSLHHLTIPYFRDEELSCTVVELKYTGNASALFILPDQDKMEEVEAMLLPETLKRWRDSLEFREIGELYLPKFSISRDYNLNDILLQLGIEEAFTSKADLSGITGARNLAVSQVVHKAVLDVFEEGTEASAATAVKITLLSALVETRTIVRFNRPFLMIIVPTDTQNIFFMSKVTNPKQA

SEQ ID NO: 27 - protein, 201 aa, Homo sapiens
  CARBOHYD 72: note = N is linked to the N-linked glycan structure Hex(7)HexNAc(6)Fuc(0)NeuAc(4)
  CARBOHYD 93: note = N is linked to the N-linked glycan structure Hex(7)HexNAc(6)Fuc(0)NeuAc(4)
  CARBOHYD 93: note = N is linked to the N-linked glycan structure Hex(6)HexNAc(5)Fuc(0)NeuAc(3)
MALSWVLTVLSLLPLLEAQIPLCANLVPVPITNATLDRITGKWFYIASAFRNEEYNKSVQEIQATFFYFTPNKTEDTIFLREYQTRQDQCIYNTTYLNVQRENGTISRYVGGQEHFAHLLILRDTKTYMLAFDVNDEKNWGLSVYADKPETTKEQLGEFYEALDCLRIPKSDVVYTDWKKDKCEPLEKQHEKERKQEEGES

SEQ ID NO: 28 - protein, 201 aa, Homo sapiens
  CARBOHYD 72: note = N is linked to the N-linked glycan structure Hex(7)HexNAc(6)Fuc(0)NeuAc(4)
MALSWVLTVLSLLPLLEAQIPLCANLVPVPITNATLDRITGKWFYIASAFRNEEYNKSVQEIQATFFYFTPNKTEDTIFLREYQTRQNQCFYNSSYLNVQRENGTVSRYEGGREHVAHLLFLRDTKTLMFGSYLDDEKNWGLSFYADKPETTKEQLGEFYEALDCLCIPRSDVMYTDWKKDKCEPLEKQHEKERKQEEGES

SEQ ID NO: 29 - protein, 4563 aa, Homo sapiens
  CARBOHYD 3895: note = N is linked to the N-linked glycan structure Hex(5)HexNAc(4)Fuc(0)NeuAc(1)
  CARBOHYD 983: note = N is linked to the N-linked glycan structure Hex(5)HexNAc(4)Fuc(0)NeuAc(2)
MDPPRPALLALLALPALLLLLLAGARAEEEMLENVSLVCPKDATRFKHLRKYTYNYEAESSSGVPGTADSRSATRINCKVELEVPQLCSFILKTSQCTLKEVYGFNPEGKALLKKTKNSEEFAAAMSRYELKLAIPEGKQVFLYPEKDEPTYILNIKRGIISALLVPPETEEAKQVLFLDTVYGNCSTHFTVKTRKGNVATEISTERDLGQCDRFKPIRTGISPLALIKGMTRPLSTLISSSQSCQYTLDAKRKHVAEAICKEQHLFLPFSYKNKYGMVAQVTQTLKLEDTPKINSRFFGEGTKKMGLAFESTKSTSPPKQAEAVLKTLQELKKLTISEQNIQRANLFNKLVTELRGLSDEAVTSLLPQLIEVSSPITLQALVQCGQPQCSTHILQWLKRVHANPLLIDVVTYLVALIPEPSAQQLREIFNMARDQRSRATLYALSHAVNNYHKTNPTGTQELLDIANYLMEQIQDDCTGDEDYTYLILRVIGNMGQTMEQLTPELKSSILKCVQSTKPSLMIQKAAIQALRKMEPKDKDQEVLLQTFLDDASPGDKRLAAYLMLMRSPSQADINKIVQILPWEQNEQVKNFVASHIANILNSEELDIQDLKKLVKEALKESQLPTVMDFRKFSRNYQLYKSVSLPSLDPASAKIEGNLIFDPNNYLPKESMLKTTLTAFGFASADLIEIGLEGKGFEPTLEALFGKQGFFPDSVNKALYWVNGQVPDGVSKVLVDHFGYTKDDKHEQDMVNGIMLSVEKLIKDLKSKEVPEARAYLRILGEELGFASLHDLQLLGKLLLMGARTLQGIPQMIGEVIRKGSKNDFFLHYIFMENAFELPTGAGLQLQISSSGVIAPGAKAGVKLEVANMQAELVAKPSVSVEFVTNMGIIIPDFARSGVQMNTNFFHESGLEAHVALKAGKLKFIIPSPKRPVKLLSGGNTLHLVSTTKTEVIPPLIENRQSWSVCKQVFPGLNYCTSGAYSNASSTDSASYYPLTGDTRLELELRPTGEIEQYSVSATYELQREDRALVDTLKFVTQAEGAKQTEATMTFKYNRQSMTLSSEVQIPDFDVDLGTILRVNDESTEGKTSYRLTLDIQNKKITEVALMGHLSCDTKEERKIKGVISIPRLQAEARSEILAHWSPAKLLLQMDSSATAYGSTVSKRVAWHYDEEKIEFEWNTGTNVDTKKMTSNFPVDLSDYPKSLHMYANRLLDHRVPQTDMTFRHVGSKLIVAMSSWLQKASGSLPYTQTLQDHLNSLKEFNLQNMGLPDFHIPENLFLKSDGRVKYTLNKNSLKIEIPLPFGGKSSRDLKMLETVRTPALHFKSVGFHLPSREFQVPTFTIPKLYQLQVPLLGVLDLSTNVYSNLYNWSASYSGGNTSTDHFSLRARYHMKADSVVDLLSYNVQGSGETTYDHKNTFTLSYDGSLRHKFLDSNIKFSHVEKLGNNPVSKGLLIFDASSSWGPQMSASVHLDSKKKQHLFVKEVKIDGQFRVSSFYAKGTYGLSCQRDPNTGRLNGESNLRFNSSYLQGTNQITGRYEDGTLSLTSTSDLQSGIIKNTASLKYENYELTLKSDTNGKYKNFATSNKMDMTFSKQNALLRSEYQADYESLRFFSLLSGSLNSHGLELNADILGTDKINSGAHKATLRIGQDGISTSATTNLKCSLLVLENELNAELGLSGASMKLTTNGRFREHNAKFSLDGKAALTELSLGSAYQAMILGVDSKNIFNFKVSQEGLKLSNDMMGSYAEMKFDHTNSLNIAGLSLDFSSKLDNIYSSDKFYKQTVNLQLQPYSLVTTLNSDLKYNALDLTNNGKLRLEPLKLHVAGNLKGAYQNNEIKHIYAISSAALSASYKADTVAKVQGVEFSHRLNTDIAGLASAIDMSTNYNSDSLHFSNVFRSVMAPFTMTIDAHTNGNGKLALWGEHTGQLYSKFLLKAEPLAFTFSHDYKGSTSHHLVSRKSISAALEHKVSALLTPAEQTGTWKLKTQFNNNEYSQDLDAYNTKDKIGVELTGRTLADLTLLDSPIKVPLLLSEPINIIDALEMRDAVEKPQEFTIVAFVKYDKNQDVHSINLPFFETLQEYFERNRQTIIVVLENVQRNLKHINIDQFVRKYRAALGKLPQQANDYLNSFNWERQVSHAKEKLTALTKKYRITENDIQIALDDAKINFNEKLSQLQTYMIQFDQYIKDSYDLHDLKIAIANIIDEIIEKLKSLDEHYHIRVNLVKTIHDLHLFIENIDFNKSGSSTASWIQNVDTKYQIRIQIQEKLQQLKRHIQNIDIQHLAGKLKQHIEAIDVRVLLDQLGTTISFERINDILEHVKHFVINLIGDFEVAEKINAFRAKVHELIERYEVDQQIQVLMDKLVELAHQYKLKETIQKLSNVLQQVKIKDYFEKLVGFIDDAVKKLNELSFKTFIEDVNKFLDMLIKKLKSFDYHQFVDETNDKIREVTQRLNGEIQALELPQKAEALKLFLEETKATVAVYLESLQDTKITLIINWLQEALSSASLAHMKAKFRETLEDTRDRMYQMDIQQELQRYLSLVGQVYSTLVTYISDWWTLAAKNLTDFAEQYSIQDWAKRMKALVEQGFTVPEIKTILGTMPAFEVSLQALQKATFQTPDFIVPLTDLRIPSVQINFKDLKNIKIPSRFSTPEFTILNTFHIPSFTIDFVEMKVKIIRTIDQMLNSELQWPVPDIYLRDLKVEDIPLARITLPDFRLPEIAIPEFIIPTLNLNDFQVPDLHIPEFQLPHISHTIEVPTFGKLYSILKIQSPLFTLDANADIGNGTTSANEAGIAASITAKGESKLEVLNFDFQANAQLSNPKINPLALKESVKFSSKYLRTEHGSEMLFFGNAIEGKSNTVASLHTEKNTLELSNGVIVKINNQLTLDSNTKYFHKLNIPKLDFSSQADLRNEIKTLLKAGHIAWTSSGKGSWKWACPRFSDEGTHESQISFTIEGPLTSFGLSNKINSKHLRVNQNLVYESGSLNFSKLEIQSQVDSQHVGHSVLTAKGMALFGEGKAEFTGRHDAHLNGKVIGTLKNSLFFSAQPFEITASTNNEGNLKVRFPLRLTGKIDFLNNYALFLSPSAQQASWQVSARFNQYKYNQNFSAGNNENIMEAHVGINGEANLDFLNIPLTIPEMRLPYTIITTPPLKDFSLWEKTGLKEFLKTTKQSFDLSVKAQYKKNKHRHSITNPLAVLCEFISQSIKSFDRHFEKNRNNALDFVTKSYNETKIKFDKYKAEKSHDELPRTFQIPGYTVPVVNVEVSPFTIEMSAFGYVFPKAVSMPSFSILGSDVRVPSYTLILPSLELPVLHVPRNLKLSLPDFKELCTISHIFIPAMGNITYDFSFKSSVITLNTNAELFNQSDIVAHLLSSSSSVIDALQYKLEGTTRLTRKRGLKLATALSLSNKFVEGSHNSTVSLTTKNMEVSVATTTKAQIPILRMNFKQELNGNTKSKPTVSSSMEFKYDFNSSMLYSTAKGAVDHKLSLESLTSYFSIESSTKGDVKGSVLSREYSGTIASEANTYLNSKSTRSSVKLQGTSKIDDIWNLEVKENFAGEATLQRIYSLWEHSTKNHLQLEGLFFTNGEHTSKATLELSPWQMSALVQVHASQPSSFHDFPDLGQEVALNANTKNQKIRWKNEVRIHSGSFQSQVELSNDQEKAHLDIAGSLEGHLRFLKNIILPVYDKSLWDFLKLDVTTSIGRRQHLRVSTAFVYTKNPNGYSFSIPVKVLADKFIIPGLKLNDLNSVLVMPTFHVPFTDLQVPSCKLDFREIQIYKKLRTSSFALNLPTLPEVKFPEVDVLTKYSQPEDSLIPFFEITVPESQLTVSQFTLPKSVSDGIAALDLNAVANKIADFELPTIIVPEQTIEIPSIKFSVPAGIVIPSFQALTARFEVDSPVYNATWSASLKNKADYVETVLDSTCSSTVQFLEYELNVLGTHKIEDGTLASKTKGTFAHRDFSAEYEEDGKYEGLQEWEGKAHLNIKSPAFTDLHLRYQKDKKGISTSAASPAVGTVGMDMDEDDDFSKWNFYYSPQSSPDKKLTIFKTELRVRESDEETQIKVNWEEEAASGLLTSLKDNVPKATGVLYDYVNKYHWEHTGLTLREVSSKLRRNLQNNAEWVYQGAIRQIDDIDVRFQKAASGTTGTYQEWKDKAQNLYQELLTQEGQASFQGLKDNVFDGLVRVTQEFHMKVKHLIDSLIDFLNFPRFQFPGKPGIYTREELCTMFIREVGTVLSQVYSKVHNGSEILFSYFQDLVITLPFELRKHKLIDVISMYRELLKDLSKEAQEVFKAIQSLKTTEVLRNLQDLLQFIFQLIEDNIKQLKEMKFTYLINYIQDEINTIFSDYIPYVFKLLKENLCLNLHKFNEFIQNELQEASQELQQIHQYIMALREEYFDPSIVGWTVKYYELEEKIVSLIKNLLVALKDFHSEYIVSASNFTSQLSSQVEQFLHRNIQEYLSILTDPDGKGKEKIAELSATAQEIIKSQAIATKKIISDYHQQFRYKLQDFSDQLSDYYEKFIAESKRLIDLSIQNYHTFLIYITELLKKLQSTTVMNPYMKLAPGELTIIL

SEQ ID NO: 30 - protein, 99 aa, Homo sapiens
  CARBOHYD 94: note = T is linked to the O-linked glycan structure Hex(1)HexNAc(1)Fuc(0)NeuAc(1)
  CARBOHYD 94: note = N is linked to the O-linked glycan structure Hex(1)HexNAc(1)Fuc(0)NeuAc(2)
MQPRVLLVVALLALLASARASEAEDASLLSFMQGYMKHATKTAKDALSSVQESQVAQQARGWVTDGFSSLKDYWSTVKDKFSEFWDLDPEVRPTSAVAA

SEQ ID NO: 31 - protein, 525 aa, Homo sapiens
  CARBOHYD 271: note = S is linked to the O-linked glycan structure Hex(2)HexNAc(2)Fuc(0)NeuAc(2)
MKALIAALLLITLQYSCAVSPTDCSAVEPEAEKALDLINKRRRDGYLFQLLRIADAHLDRVENTTVYYLVLDVQESDCSVLSRKYWNDCEPPDSRRPSEIVIGQCKVIATRHSHESQDLRVIDFNCTTSSVSSALANTKDSPVLIDFFEDTERYRKQANKALEKYKEENDDFASFRVDRIERVARVRGGEGTGYFVDFSVRNCPRHHFPRHPNVFGFCRADLFYDVEALDLESPKNLVINCEVFDPQEHENINGVPPHLGHPFHWGGHERSSTTKPPFKPHGSRDHHHPHKPHEHGPPPPPDERDHSHGPPLPQGPPPLLPMSCSSCQHATFGTNGAQRHSHNNNSSDLHPHKHHSHEQHPHGHHPHAHHPHEHDTHRQHPHGHHPHGHHPHGHHPHGHHPHGHHPHCHDFQDYGPCDPPPHNQGHCCHGHGPPPGHLRRRGPGKGPRPFHCRQIGSVYRLPPLRKGEVLPLPEANFPSFPLPHHKHPLKPDNQPFPQSVSESCPGKFKSGFPQVSMFFTHTFPK

SEQ ID NO: 32 - protein, 398 aa, Homo sapiens
  CARBOHYD 144: note = N is linked to the N-linked glycan structure Hex(4)HexNAc(4)Fuc(0)NeuAc(1)
ASPTSPKVFPLSLCSTQPDGNVVIACLVQGFFPQEPLSVTWSESGQGVTARNFPPSQDASGDLYTTSSQLTLPATQCLAGKSVTCHVKHYTNPSQDVTVPCPVPSTPPTPSPSTPPTPSPSCCHPRLSLHRPALEDLLLGSEANLTCTLTGLRDASGVTFTWTPSSGKSAVQGPPERDLCGCYSVSSVLPGCAEPWNHGKTFTCTAAYPESKTPLTATLSKSGNTFRPEVHLLPPPSEELALNELVTLTCLARGFSPKDVLVRWLQGSQELPREKYLTWASRQEPSQGTTTFAVTSILRVAAEDWKKGDTFSCMVGHEALPLAFTQKTIDRLADWQMPPPYVVLDLPQETLEEETPGANLWPTTITFLTLFLLSLFYSTALTVTSVRGPSGNREGPQY

SEQ ID NO: 33 - protein, 391 aa, Homo sapiens
  CARBOHYD 144: note = G is linked to the N-linked glycan structure Hex(4)HexNAc(4)Fuc(0)NeuAc(1)
ASPTSPKVFPLSLDSTPQDGNVVVACLVQGFFPQEPLSVTWSESGQNVTARNFPPSQDASGDLYTTSSQLTLPATQCPDGKSVTCHVKHYTNSSQDVTVPCRVPPPPPCCHPRLSLHRPALEDLLLGSEANLTCTLTGLRDASGATFTWTPSSGKSAVQGPPERDLCGCYSVSSVLPGCAQPWNHGETFTCTAAHPELKTPLTANITKSGNTFRPEVHLLPPPSEELALNELVTLTCLARGFSPKDVLVRWLQGSQELPREKYLTWASRQEPSQGTTTYAVTSILRVAAEDWKKGETFSCMVGHEALPLAFTQKTIDRMAGSCCVADWQMPPPYVVLDLPQETLEEETPGANLWPTTITFLTLFLLSLFYSTALTVTSVRGPSGKREGPQY

SEQ ID NO: 34 - protein, 399 aa, Homo sapiens
  CARBOHYD 180: note = N is linked to the N-linked glycan structure Hex(5)HexNAc(4)Fuc(1)NeuAc(0)
ASTKGPSVFPLAPSSKSTSGGTAALGCLVKDYFPEPVTVSWNSGALTSGVHTFPAVLQSSGLYSLSSVVTVPSSSLGTQTYICNVNHKPSNTKVDKKVEPKSCDKTHTCPPCPAPELLGGPSVFLFPPKPKDTLMISRTPEVTCVVVDVSHEDPEVKFNWYVDGVEVHNAKTKPREEQYNSTYRVVSVLTVLHQDWLNGKEYKCKVSNKALPAPIEKTISKAKGQPREPQVYTLPPSRDELTKNQVSLTCLVKGFYPSDIAVEWESNGQPENNYKTTPPVLDSDGSFFLYSKLTVDKSRWQQGNVFSCSVMHEALHNHYTQKSLSLSPELQLEESCAEAQDGELDGLWTTITIFITLFLLSVCYSATVTFFKVKWIFSSVVDLKQTIIPDYRNMIGQGA

SEQ ID NO: 35 - protein, 395 aa, Homo sapiens
  CARBOHYD 176: note = N is linked to the N-linked glycan structure Hex(4)HexNAc(4)Fuc(1)NeuAc(0)
  CARBOHYD 176: note = N is linked to the N-linked glycan structure Hex(5)HexNAc(4)Fuc(1)NeuAc(0)
  CARBOHYD 176: note = N is linked to the N-linked glycan structure Hex(3)HexNAc(5)Fuc(0)NeuAc(0)
  CARBOHYD 176: note = N is linked to the N-linked glycan structure Hex(4)HexNAc(5)Fuc(0)NeuAc(0)
ASTKGPSVFPLAPCSRSTSESTAALGCLVKDYFPEPVTVSWNSGALTSGVHTFPAVLQSSGLYSLSSVVTVPSSNFGTQTYTCNVDHKPSNTKVDKTVERKCCVECPPCPAPPVAGPSVFLFPPKPKDTLMISRTPEVTCVVVDVSHEDPEVQFNWYVDGVEVHNAKTKPREEQFNSTFRVVSVLTVVHQDWLNGKEYKCKVSNKGLPAPIEKTISKTKGQPREPQVYTLPPSREEMTKNQVSLTCLVKGFYPSDISVEWESNGQPENNYKTTPPMLDSDGSFFLYSKLTVDKSRWQQGNVFSCSVMHEALHNHYTQKSLSLSPELQLEESCAEAQDGELDGLWTTITIFITLFLLSVCYSATITFFKVKWIFSSVVDLKQTIVPDYRNMIRQGA

SEQ ID NO: 36 - protein, 638 aa, Homo sapiens
  CARBOHYD 494: note = N is linked to the N-linked glycan structure Hex(5)HexNAc(4)Fuc(0)NeuAc(2)
  CARBOHYD 453: note = N is linked to the N-linked glycan structure Hex(5)HexNAc(4)Fuc(0)NeuAc(2)
MILFKQATYFISLFATVSCGCLTQLYENAFFRGGDVASMYTPNAQYCQMRCTFHPRCLLFSFLPASSINDMEKRFGCFLKDSVTGTLPKVHRTGAVSGHSLKQCGHQISACHRDIYKGVDMRGVNFNVSKVSSVEECQKRCTNNIRCQFFSYATQTFHKAEYRNNCLLKYSPGGTPTAIKVLSNVESGFSLKPCALSEIGCHMNIFQHLAFSDVDVARVLTPDAFVCRTICTYHPNCLFFTFYTNVWKIESQRNVCLLKTSESGTPSSSTPQENTISGYSLLTCKRTLPEPCHSKIYPGVDFGGEELNVTFVKGVNVCQETCTKMIRCQFFTYSLLPEDCKEEKCKCFLRLSMDGSPTRIAYGTQGSSGYSLRLCNTGDNSVCTTKTSTRIVGGTNSSWGEWPWQVSLQVKLTAQRHLCGGSLIGHQWVLTAAHCFDGLPLQDVWRIYSGILNLSDITKDTPFSQIKEIIIHQNYKVSEGNHDIALIKLQAPLNYTEFQKPICLPSKGDTSTIYTNCWVTGWGFSKEKGEIQNILQKVNIPLVTNEECQKRYQDYKITQRMVCAGYKEGGKDACKGDSGGPLVCKHNGMWRLVGITSWGEGCARREQPGVYTKVAEYMDWILEKTQSSDGKAQMQSPA

SEQ ID NO: 37 - protein, 464 aa, Homo sapiens
MYSNVIGTVTSGKRKVYLLSLLLIGFWDCVTCHGSPVDICTAKPRDIPMNPMCIYRSPEKKATEDEGSEQKIPEATNRRVWELSKANSRFATTFYQHLADSKNDNDNIFLSPLSISTAFAMTKLGACNDTLQQLMEVFKFDTISEKTSDQIHFFFAKLNCRLYRKANKSSKLVSANRLFGDKSLTFNETYQDISELVYGAKLQPLDFKENAEQSRAAINKWVSNKTEGRITDVIPSEAINELTVLVLVNTIYFKGLWKSKFSPENTRKELFYKADGESCSASMMYQEGKFRYRRVAEGTQVLELPFKGDDITMVLILPKPEKSLAKVEKELTPEVLQEWLDELEEMMLVVHMPRFRIEDGFSLKEQLQDMGLVDLFSPEKSKLPGIVAEGRDDLYVSDAFHKAFLEVNEEGSEAAASTAVVIAGRSLNPNRVTFKANRPFLVFIREVPLNTIIFMGRVANPCVK

SEQ ID NO: 38 - protein, 367 aa, Homo sapiens
MKSLVLLLCLAQLWGCHSAPHGPGLIYRQPNCDDPETEEAALVAIDYINQNLPWGYKHTLNQIDEVKVWPQQPSGELFEIEIDTLETTCHVLDPTPVARCSVRQLKEHAVEGDCDFQLLKLDGKFSVVYAKCDSSPDSAEDVRKVCQDCPLLAPLNDTRVVHAAKAALAAFNAQNNGSNFQLEEISRAQLVPLPPSTYVEFTVSGTDCVAKEATEAAKCNLLAEKQYGFCKATLSEKLGGAEVAVTCMVFQTQPVSSQPQPEGANEAVPTPVVDPDAPPSPPLGAPGLPPAGSPPDSHVLLAAPPGHQLHRAHYDLRHTFMGVVSLGSPSGEVSHPRKTRTVVQPSVGAAAGPVVPPCPGRIRHFKV

SEQ ID NO: 39 - protein, 462 aa, Homo sapiens
  CARBOHYD 187: note = N is linked to the N-linked glycan structure Hex(5)HexNAc(4)Fuc(0)NeuAc(1)
MARVLGAPVALGLWSLCWSLAIATPLPPTSAHGNVAEGETKPDPDVTERCSDGWSFDATTLDDNGTMLFFKGEFVWKSHKWDRELISERWKNFPSPVDAAFRQGHNSVFLIKGDKVWVYPPEKKEKGYPKLLQDEFPGIPSPLDAAVECHRGECQAEGVLFFQGDREWFWDLATGTMKERSWPAVGNCSSALRWLGRYYCFQGNQFLRFDPVRGEVPPRYPRDVRDYFMPCPGRGHGHRNGTGHGNSTHHGPEYMRCSPHLVLSALTSDNHGATYAFSGTHYWRLDTSRDGWHSWPIAHQWPQGPSAVDAAFSWEEKLYLVQGTQVYVFLTKGGYTLVSGYPKRLEKEVGTPHGIILDSVDAAFICPGSSRLHIMAGRRLWWLDLKSGAQATWTELPWPHEKVDGALCMEKSLGPNSCSANGPGLYLIHGPNLYCYSDVEKLNAAKALPQPQNVTSLLGCTH

SEQ ID NO: 40 - protein, 934 aa, Homo sapiens
  CARBOHYD 324: note = N is linked to the N-linked glycan structure Hex(5)HexNAc(4)Fuc(0)NeuAc(2)
MARRSVLYFILLNALINKGQACFCDHYAWTQWTSCSKTCNSGTQSRHRQIVVDKYYQENFCEQICSKQETRECNWQRCPINCLLGDFGPWSDCDPCIEKQSKVRSVLRPSQFGGQPCTAPLVAFQPCIPSKLCKIEEADCKNKFRCDSGRCIARKLECNGENDCGDNSDERDCGRTKAVCTRKYNPIPSVQLMGNGFHFLAGEPRGEVLDNSFTGGICKTVKSSRTSNPYRVPANLENVGFEVQTAEDDLKTDFYKDLTSLGHNENQQGSFSSQGGSSFSVPIFYSSKRSENINHNSAFKQAIQASHKKDSSFIRIHKVMKVLNFTTKAKDLHLSDVFLKALNHLPLEYNSALYSRIFDDFGTHYFTSGSLGGVYDLLYQFSSEELKNSGLTEEEAKHCVRIETKKRVLFAKKTKVEHRCTTNKLSEKHEGSFIQGAEKSISLIRGGRSEYGAALAWEKGSSGLEEKTFSEWLESVKENPAVIDFELAPIVDLVRNIPCAVTKRNNLRKALQEYAAKFDPCQCAPCPNNGRPTLSGTECLCVCQSGTYGENCEKQSPDYKSNAVDGQWGCWSSWSTCDATYKRSRTRECNNPAPQRGGKRCEGEKRQEEDCTFSIMENNGQPCINDDEEMKEVDLPEIEADSGCPQPVPPENGFIRNEKQLYLVGEDVEISCLTGFETVGYQYFRCLPDGTWRQGDVECQRTECIKPVVQEVLTITPFQRLYRIGESIELTCPKGFVVAGPSRYTCQGNSWTPPISNSLTCEKDTLTKLKGHCQLGQKQSGSECICMSPEEDCSHHSEDLCVFDTDSNDYFTSPACKFLAEKCLNNQQLHFLHIGSCQDGRQLEWGLERTRLSSNSTKKESCGYDTCYDWEKCSASTSKCVCLLPPQCFKGGNQLYCVKMGSSTSEKTLNICEVGTIRCANRKMEILHPGKCLA

SEQ ID NO: 41 - protein, 622 aa, Homo sapiens
  CARBOHYD 121: note = N is linked to the N-linked glycan structure Hex(5)HexNAc(4)Fuc(1)NeuAc(2)
MAHVRGLQLPGCLALAALCSLVHSQHVFLAPQQARSLLQRVRRANTFLEEVRKGNLERECVEETCSYEEAFEALESSTATDVFWAKYTACETARTPRDKLAACLEGNCAEGLGTNYRGHVNITRSGIECQLWRSRYPHKPEINSTTHPGADLQENFCRNPDSSTTGPWCYTTDPTVRRQECSIPVCGQDQVTVAMTPRSEGSSVNLSPPLEQCVPDRGQQYQGRLAVTTHGLPCLAWASAQAKALSKHQDFNSAVQLVENFCRNPDGDEEGVWCYVAGKPGDFGYCDLNYCEEAVEEETGDGLDEDSDRAIEGRTATSEYQTFFNPRTFGSGEADCGLRPLFEKKSLEDKTERELLESYIDGRIVEGSDAEIGMSPWQVMLFRKSPQELLCGASLISDRWVLTAAHCLLYPPWDKNFTENDLLVRIGKHSRTRYERNIEKISMLEKIYIHPRYNWRENLDRDIALMKLKKPVAFSDYIHPVCLPDRETAASLLQAGYKGRVTGWGNLKETWTANVGKGQPSVLQVVNLPIVERPVCKDSTRIRITDNMFCAGYKPDEGKRGDACEGDSGGPFVMKSPFNNRWYQMGIVSWGEGCDRDGKYGFYTHVFRLKKWIQKVIDQFGE

SEQ ID NO: 42 - protein, 1231 aa, Homo sapiens
  CARBOHYD 529: note = N is linked to the N-linked glycan structure Hex(5)HexNAc(4)Fuc(0)NeuAc(2)
MRLLAKIICLMLWAICVAEDCNELPPRRNTEILTGSWSDQTYPEGTQAIYKCRPGYRSLGNVIMVCRKGEWVALNPLRKCQKRPCGHPGDTPFGTFTLTGGNVFEYGVKAVYTCNEGYQLLGEINYRECDTDGWTNDIPICEVVKCLPVTAPENGKIVSSAMEPDREYHFGQAVRFVCNSGYKIEGDEEMHCSDDGFWSKEKPKCVEISCKSPDVINGSPISQKIIYKENERFQYKCNMGYEYSERGDAVCTESGWRPLPSCEEKSCDNPYIPNGDYSPLRIKHRTGDEITYQCRNGFYPATRGNTAKCTSTGWIPAPRCTLKPCDYPDIKHGGLYHENMRRPYFPVAVGKYYSYYCDEHFETPSGSYWDHIHCTQDGWSPAVPCLRKCYFPYLENGYNQNYGRKFVQGKSIDVACHPGYALPKAQTTVTCMENGWSPTPRCIRVKTCSKSSIDIENGFISESQYTYALKEKAKYQCKLGYVTADGETSGSITCGKDGWSAQPTCIKSCDIPVFMNARTKNDFTWFKLNDTLDYECHDGYESNTGSTTGSIVCGYNGWSDLPICYERECELPKIDVHLVPDRKKDQYKVGEVLKFSCKPGFTIVGPNSVQCYHFGLSPDLPICKEQVQSCGPPPELLNGNVKEKTKEEYGHSEVVEYYCNPRFLMKGPNKIQCVDGEWTTLPVCIVEESTCGDIPELEHGWAQLSSPPYYYGDSVEFNCSESFTMIGHRSITCIHGVWTQLPQCVAIDKLKKCKSSNLIILEEHLKNKKEFDHNSNIRYRCRGKEGWIHTVCINGRWDPEVNCSMAQIQLCPPPPQIPNSHNMTTTLNYRDGEKVSVLCQENYLIQEGEEITCKDGRWQSIPLCVEKIPCSQPPQIEHGTINSSRSSQESYAHGTKLSYTCEGGFRISEENETTCYMGKWSSPPQCEGLPCKSPPEISHGVVAHMSDSYQYGEEVTYKCFEGFGIDGPAIAKCLGEKWSHPPSCIKTDCLSLPSFENAIPMGEKKDVYKAGEQVTYTCATYYKMDGASNVTCINSRWTGRPTCRDTSCVNPPTVQNAYIVSRQMSKYPSGERVRYQCRSPYEMFGDEEVMCLNGNWTEPPQCKDSTGKCGPPPPIDNGDITSFPLSVYAPASSVEYQCQNLYQLEGNKRITCRNGQWSEPPKCLHPCVISREIMENYNIALRWTAKQKLYSRTGESVEFVCKRGYRLSSRSHTLRTTCWDGKLEYPTCAKR

SEQ ID NO: 43 - protein, 189 aa, Homo sapiens
  CARBOHYD 98: note = N is linked to the N-linked glycan structure Hex(5)HexNAc(4)Fuc(0)NeuAc(2)
MVMLLLLLSALAGLFGAAEGQAFHLGKCPNPPVQENFDVNKYLGRWYEIEKIPTTFENGRCIQANYSLMENGKIKVLNQELRADGTVNQIEGEATPVNLTEPAKLEVKFSWFMPSAPYWILATDYENYALVYSCTCIIQLFHVDFAWILARNPNLPPETVDSLKNILTSNNIDVKKMTVTDQVNCPKLS

SEQ ID NO: 44 - protein, 330 aa, Homo sapiens
MWLLVSVILISRISSVGGEATFCDFPKINHGILYDEEKYKPFSQVPTGEVFYYSCEYNFVSPSKSFWTRITCTEEGWSPTPKCLRLCFFPFVENGHSESSGQTHLEGDTVQIICNTGYRLQNNENNISCVERGWSTPPKCRSTDTSCVNPPTVQNAHILSRQMSKYPSGERVRYECRSPYEMFGDEEVMCLNGNWTEPPQCKDSTGKCGPPPPIDNGDITSFPLSVYAPASSVEYQCQNLYQLEGNKRITCRNGQWSEPPKCLHPCVISREIMENYNIALRWTAKQKLYLRTGESAEFVCKRGYRLSSRSHTLRTTCWDGKLEYPTCAKR

SEQ ID NO: 45 - protein, 866 aa, Homo sapiens
MFSMRIVCLVLSVVGTAWTADSGEGDFLAEGGGVRGPRVVERHQSACKDSDWPFCSDEDWNYKCPSGCRMKGLIDEVNQDFTNRINKLKNSLFEYQKNNKDSHSLTTNIMEILRGDFSSANNRDNTYNRVSEDLRSRIEVLKRKVIEKVQHIQLLQKNVRAQLVDMKRLEVDIDIKIRSCRGSCSRALAREVDLKDYEDQQKQLEQVIAKDLLPSRDRQHLPLIKMKPVPDLVPGNFKSQLQKVPPEWKALTDMPQMRMELERPGGNEITRGGSTSYGTGSETESPRNPSSAGSWNSGSSGPGSTGNRNPGSSGTGGTATWKPGSSGPGSTGSWNSGSSGTGSTGNQNPGSPRPGSTGTWNPGSSERGSAGHWTSESSVSGSTGQWHSESGSFRPDSPGSGNARPNNPDWGTFEEVSGNVSPGTRREYHTEKLVTSKGDKELRTGKEKVTSGSTTTTRRSCSKTVTKTVIGPDGHKEVTKEVVTSEDGSDCPEAMDLGTLSGIGTLDGFRHRHPDEAAFFDTASTGKTFPGFFSPMLGEFVSETESRGSESGIFTNTKESSSHHPGIAEFPSRGKSSSYSKQFTSSTSYNRGDSTFESKSYKMADEAGSEADHEGTHSTKRGHAKSRPVRDCDDVLQTHPSGTQSGIFNIKLPGSSKIFSVYCDQETSLGGWLLIQQRMDGSLNFNRTWQDYKRGFGSLNDEGEGEFWLGNDYLHLLTQRGSVLRVELEDWAGNEAYAEYHFRVGSEAEGYALQVSSYEGTAGDALIEGSVEEGAEYTSHNNMQFSTFDRDADQWEENCAEVYGGGWWYNNCQAANLNGIYYPGGSYDPRNNSPYEIENGVVWVSFRGADYSLRAVRMKIRPLVTQ

SEQ ID NO: 46 - protein, 21 aa, synthetic construct
  CARBOHYD 10: note = N is linked to the N-linked glycan structure Hex(5)HexNAc(4)Fuc(0)NeuAc(2
IITILEEEMNVSVCGLYTYGK

SEQ ID NO: 47 - protein, 10 aa, synthetic construct
  CARBOHYD 1: note = N is linked to the N-linked glycan structure Hex(5)HexNAc(4)Fuc(1)NeuAc(0)
NFTENDLLVR

SEQ ID NO: 48 - protein, 32 aa, synthetic construct
  CARBOHYD 14: note = N is linked to the glycan structure Hex(6)HexNAc(5)Fuc(0)NeuAc(2)
ADTHDEILEGLNFNLTEIPEAQIHEGFQELLR

SEQ ID NO: 49 - protein, 19 aa, synthetic construct
EEAPSLRPAPPPISGGGYR

SEQ ID NO: 50 - protein, 7 aa, synthetic construct
AFLLTPR

SEQ ID NO: 51 - protein, 32 aa, synthetic construct
  CARBOHYD 5: note = N is linked to the N-linked glycan structure Hex(5)HexNAc(4)Fuc(0)NeuAc(2)
NCGVNCSGDVFTALIGEIASPNYPKPYPENSR

SEQ ID NO: 52 - protein, 27 aa, synthetic construct
  CARBOHYD 1: note = N is linked to the glycan structure Hex(6)HexNAc(5)Fuc(0)NeuAc(2)
  CARBOHYD 1: note = N is linked to the N-linked glycan structure Hex(5)HexNAc(4)Fuc(1)NeuAc(2)
NISDGFDGIPDNVDAALALPAHSYSGR

SEQ ID NO: 53 - protein, 26 aa, synthetic construct
  CARBOHYD 17: note = N is linked to the N-linked glycan structure Hex(5)HexNAc(4)Fuc(0)NeuAc(2)
  CARBOHYD 17: note = N is linked to the N-linked glycan structure Hex(5)HexNAc(4)Fuc(0)NeuAc(1)
WVLTAAHCLLYPPWDKNFTENDLLVR

SEQ ID NO: 54 - protein, 19 aa, synthetic construct
IIVPLNNRENISDPTSPLR

SEQ ID NO: 55 - protein, 20 aa, synthetic construct
  CARBOHYD 3: note = N is linked to the N-linked glycan structure Hex(5)HexNAc(4)Fuc(0)NeuAc(1)
TLNQSSDELQLSMGNAMFVK

SEQ ID NO: 56 - protein, 19 aa, synthetic construct
  CARBOHYD 3: note = N is linked to the N-linked glycan structure Hex(5)HexNAc(4)Fuc(0)NeuAc(2)
VSNQTLSLFFTVLQDVPVR

SEQ ID NO: 57 - protein, 25 aa, synthetic construct
  CARBOHYD 17: note = N is linked to the N-linked glycan structure Hex(5)HexNAc(4)Fuc(0)NeuAc(1)
SPYEMFGDEEVMCLNGNWTEPPQCK

SEQ ID NO: 58 - protein, 14 aa, synthetic construct
  CARBOHYD 1: note = S is linked to the O-linked glycan structure Hex(2)HexNAc(2)Fuc(0)NeuAc(2)
SSTTKPPFKPHGSR

SEQ ID NO: 59 - protein, 9 aa, synthetic construct
  CARBOHYD 6: note = N is linked to the N-linked glycan structure Hex(5)HexNAc(4)Fuc(1)NeuAc(0)
TPLTANITK

SEQ ID NO: 60 - protein, 16 aa, synthetic construct
  CARBOHYD 5: note = N is linked to the N-linked glycan structure Hex(5)HexNAc(4)Fuc(0)NeuAc(2)
LGACNDTLQQLMEVFK

SEQ ID NO: 61 - protein, 13 aa, synthetic construct
CGLVPVLAENYNK

SEQ ID NO: 62 - protein, 23 aa, synthetic construct
  CARBOHYD 15: note = N is linked to the N-linked glycan structure Hex(5)HexNAc(4)Fuc(0)NeuAc(2)
TELFSSSCPGGIMLNETGQGYQR

SEQ ID NO: 63 - protein, 1474 aa, Homo sapiens; identical to SEQ ID NO: 25
  CARBOHYD 247: note = N is linked to the N-linked glycan structure  Hex(5)H exNAc(4)Fuc(0)NeuAc(2)
  CARBOHYD 1424: note = N is linked to the N-linked glycan structure  Hex(5)H exNAc(4)Fuc(0)NeuAc(2)

SEQ ID NO: 64 - protein, 622 aa, Homo sapiens; identical to SEQ ID NO: 41
  CARBOHYD 416: note = N is linked to the N-linked glycan structure  Hex(5)H exNAc(4)Fuc(0)NeuAc(1)

SEQ ID NO: 65 - protein, 418 aa, Homo sapiens; identical to SEQ ID NO: 24
  CARBOHYD 107: note = N is linked to the N-linked glycan structure Hex(6)HexNAc(5)Fuc(0)NeuAc(2)

SEQ ID NO: 66 - protein, 491 aa, Homo sapiens
MKRMVSWSFHKLKTMKHLLLLLLCVFLVKSQGVNDNEEGFFSARGHRPLDKKREEAPSLRPAPPPISGGGYRARPAKAAATQKKVERKAPDAGGCLHADPDLGVLCPTGCQLQEALLQQERPIRNSVDELNNNVEAVSQTSSSSFQYMYLLKDLWQKRQKQVKDNENVVNEYSSELEKHQLYIDETVNSNIPTNLRVLRSILENLRSKIQKLESDVSAQMEYCRTPCTVSCNIPVVSGKECEEIIRKGGETSEMYLIQPDSSVKPYRVYCDMNTENGGWTVIQNRQDGSVDFGRKWDPYKQGFGNVATNTDGKNYCGLPGEYWLGNDKISQLTRMGPTELLIEMEDWKGDKVKAHYGGFTVQNEANKYQISVNKYRGTAGNALMDGASQLMGENRTMTIHNGMFFSTYDRDNDGWLTSDPRKQCSKEDGGGWWYNRCHAANPNGRYYWGGQYTWDMAKHGTDDGVVWMNWKGSWYSMRKMSMKIRPFFPQQ

SEQ ID NO: 67 - protein, 188 aa, Homo sapiens
  CARBOHYD 135: note = N is linked to the N-linked glycan structure  Hex(5)H exNAc(4)Fuc(0)NeuAc(2)
MFHQIWAALLYFYGIILNSIYQCPEHSQLTTLGVDGKEFPEVHLGQWYFIAGAAPTKEELATFDPVDNIVFNMAAGSAPMQLHLRATIRMKDGLCVPRKWIYHLTEGSTDLRTEGRPDMKTELFSSSCPGGIMLNETGQGYQRFLLYNRSPHPPEKCVEEFKSLTSCLDSKAFLLTPRNQEACELSNN

SEQ ID NO: 68 - protein, 688 aa, Homo sapiens
  CARBOHYD 174: note = N is linked to the N-linked glycan structure  Hex(5)H exNAc(4)Fuc(0)NeuAc(2)
MWCIVLFSLLAWVYAEPTMYGEILSPNYPQAYPSEVEKSWDIEVPEGYGIHLYFTHLDIELSENCAYDSVQIISGDTEEGRLCGQRSSNNPHSPIVEEFQVPYNKLQVIFKSDFSNEERFTGFAAYYVATDINECTDFVDVPCSHFCNNFIGGYFCSCPPEYFLHDDMKNCGVNCSGDVFTALIGEIASPNYPKPYPENSRCEYQIRLEKGFQVVVTLRREDFDVEAADSAGNCLDSLVFVAGDRQFGPYCGHGFPGPLNIETKSNALDIIFQTDLTGQKKGWKLRYHGDPMPCPKEDTPNSVWEPAKAKYVFRDVVQITCLDGFEVVEGRVGATSFYSTCQSNGKWSNSKLKCQPVDCGIPESIENGKVEDPESTLFGSVIRYTCEEPYYYMENGGGGEYHCAGNGSWVNEVLGPELPKCVPVCGVPREPFEEKQRIIGGSDADIKNFPWQVFFDNPWAGGALINEYWVLTAAHVVEGNREPTMYVGSTSVQTSRLAKSKMLTPEHVFIHPGWKLLEVPEGRTNFDNDIALVRLKDPVKMGPTVSPICLPGTSSDYNLMDGDLGLISGWGRTEKRDRAVRLKAARLPVAPLRKCKEVKVEKPTADAEAYVFTPNMICAGGEKGMDSCKGDSGGAFAVQDPNDKTKFYAAGLVSWGPQCGTYGLYTRVKNYVDWIMKTMQENSTPRED

SEQ ID NO: 69 - protein, 478 aa, Homo sapiens
  CARBOHYD 242: note = N is linked to the N-linked glycan structure  Hex(5)H exNAc(4)Fuc(1)NeuAc(2)
MAPLRPLLILALLAWVALADQESCKGRCTEGFNVDKKCQCDELCSYYQSCCTDYTAECKPQVTRGDVFTMPEDEYTVYDDGEEKNNATVHEQVGGPSLTSDLQAQSKGNPEQTPVLKPEEEAPAPEVGASKPEGIDSRPETLHPGRPQPPAEEELCSGKPFDAFTDLKNGSLFAFRGQYCYELDEKAVRPGYPKLIRDVWGIEGPIDAAFTRINCQGKTYLFKGSQYWRFEDGVLDPDYPRNISDGFDGIPDNVDAALALPAHSYSGRERVYFFKGKQYWEYQFQHQPSQEECEGSSLSAVFEHFAMMQRDSWEDIFELLFWGRTSAGTRQPQFISRDWHGVPGQVDAAMAGRIYISGMAPRPSLAKKQRFRHRNRKGYRSQRGHSRGRNQNSRRPSRATWLSLFSSEESNLGANNYDDYRMDWLVPATCEPIQSVFFFSGDKYYRVNLRTRRVDTVDPPYPRSIAQYWLGCPAPGHL

SEQ ID NO: 70 - protein, 159 aa, Homo sapiens
MKNHLLFWGVLAVFIKAVHVKAQEDERIVLVDNKCKCARITSRIIRSSEDPNEDIVERNIRIIVPLNNRENISDPTSPLRTRFVYHLSDLCKKCDPTEVELDNQIVTATQSNICDEDSATETCYTYDRNKCYTAVVPLVYGGETKMVETALTPDACYPD

SEQ ID NO: 71 - protein, 423 aa, Homo sapiens; identical to SEQ ID NO: 26
  CARBOHYD 127: note = N is linked to the N-linked glycan structure  Hex(5)H exNAc(4)Fuc(0)NeuAc(1)

SEQ ID NO: 72 - protein, 1231 aa, Homo sapiens; identical to SEQ ID NO: 42
  CARBOHYD 1095: note = N is linked to the N-linked glycan structure  Hex(5)H exNAc(4)Fuc(0)NeuAc(1)

SEQ ID NO: 73 - protein, 525 aa, Homo sapiens; identical to SEQ ID NO: 31
  CARBOHYD 271: note = S  is linked to the O-linked glycan structure Hex(2)HexNAc(2)Fuc(0)NeuAc(2)

SEQ ID NO: 74 - protein, 391 aa, Homo sapiens; identical to SEQ ID NO: 33
  CARBOHYD 205: note = N is linked to the N-linked glycan structure Hex(5)HexNAc(4)Fuc(1)NeuAc(0)

SEQ ID NO: 75 - protein, 464 aa, Homo sapiens; identical to SEQ ID NO: 37
  CARBOHYD 128: note = N is linked to the N-linked glycan structure Hex(5)HexNAc(4)Fuc(0)NeuAc(2)

SEQ ID NO: 76 - protein, 698 aa, Homo sapiens
MRLAVGALLVCAVLGLCLAVPDKTVRWCAVSEHEATKCQSFRDHMKSVIPSDGPSVACVKKASYLDCIRAIAANEADAVTLDAGLVYDAYLAPNNLKPVVAEFYGSKEDPQTFYYAVAVVKKDSGFQMNQLRGKKSCHTGLGRSAGWNIPIGLLYCDLPEPRKPLEKAVANFFSGSCAPCADGTDFPQLCQLCPGCGCSTLNQYFGYSGAFKCLKDGAGDVAFVKHSTIFENLANKADRDQYELLCLDNTRKPVDEYKDCHLAQVPSHTVVARSMGGKEDLIWELLNQAQEHFGKDKSKEFQLFSSPHGKDLLFKDSAHGFLKVPPRMDAKMYLGYEYVTAIRNLREGTCPEAPTDECKPVKWCALSHHERLKCDEWSVNSVGKIECVSAETTEDCIAKIMNGEADAMSLDGGFVYIAGKCGLVPVLAENYNKSDNCEDTPEAGYFAVAVVKKSASDLTWDNLKGKKSCHTAVGRTAGWNIPMGLLYNKINHCRFDEFFSEGCAPGSKKDSSLCKLCMGSGLNLCEPNNKEGYYGYTGAFRCLVEKGDVAFVKHQTVPQNTGGKNPDPWAKNLNEKDYELLCLDGTRKPVEEYANCHLARAPNHAVVTRKDKEACVHKILRQQQHLFGSNVTDCSGNFCLFRSETKDLLFRDDTVCLAKLHDRNTYEKYLGEEYVKAVGNLRKCSTSSLLEACTFRRP

SEQ ID NO: 77 - protein, 32 aa, synthetic construct; identical to SEQ ID NO: 48
  CARBOHYD 14: note = N is linked to the N-linked glycan structure Hex(5)HexNAc(4)Fuc(1)NeuAc(2)
  CARBOHYD 14: note = N is linked to glycan structure Hex(6)HexNAc(5)Fuc(1)NeuAc(1)

SEQ ID NO: 78 - protein, 30 aa, synthetic construct
  CARBOHYD 7: note = N is linked to the N-linked glycan structure Hex(5)HexNAc(4)Fuc(0)NeuAc(2)
QLAHQSNSTNIFFSPVSIATAFAMLSLGTK

SEQ ID NO: 79 - protein, 33 aa, synthetic construct
  CARBOHYD 27: note = N is linked to the N-linked glycan structure Hex(5)HexNAc(4)Fuc(0)NeuAc(2)
EGDHEFLEVPEAQEDVEATFPVHQPGNYSCSYR

SEQ ID NO: 80 - protein, 19 aa, synthetic construct
VSNQTLSLFFTVLQDVPVR

SEQ ID NO: 81 - protein, 33 aa, synthetic construct
  CARBOHYD 10: note = N is linked to the glycan structure Hex(5)HexNAc(2)Fuc(0)NeuAc(0)
  CARBOHYD 10: note = N is linked to the N-linked glycan structure Hex(5)HexNAc(4)Fuc(0)NeuAc(1)
IITILEEEMNVSVCGLYTYGKPVPGHVTVSICR

SEQ ID NO: 82 - protein, 21 aa, synthetic construct
  CARBOHYD 10: note = N is linked to the N-linked glycan structure Hex(5)HexNAc(4)Fuc(0)NeuAc(1)
IITILEEEMNVSVCGLYTYGK

SEQ ID NO: 83 - protein, 22 aa, synthetic construct
  CARBOHYD 9: note = N is linked to the N-linked glycan structure Hex(5)HexNAc(4)Fuc(1)NeuAc(2)
GCVLLSYLNETVTVSASLESVR

SEQ ID NO: 84 - protein, 32 aa, synthetic construct
  CARBOHYD 6: note = N is linked to the N-linked glycan structure Hex(5)HexNAc(4)Fuc(0)NeuAc(1)
  CARBOHYD 6: note = N is linked to the N-linked glycan structure Hex(5)HexNAc(4)Fuc(0)NeuAc(2)
  CARBOHYD 6: note = N is linked to the glycan structure Hex(6)HexNAc(3)Fuc(0)NeuAc(1)
SLGNVNFTVSAEALESQELCGTEVPSVPEHGR

SEQ ID NO: 85 - protein, 16 aa, synthetic construct
  CARBOHYD 4: note = N is linked to the glycan structure Hex(6)HexNAc(5)Fuc(1)NeuAc(2)
YTGNASALFILPDQDK

SEQ ID NO: 86 - protein, 15 aa, synthetic construct
  CARBOHYD 7: note = N is linked to the glycan structure Hex(7)HexNAc(6)Fuc(1)NeuAc(4)
QDQCIYNTTYLNVQR

SEQ ID NO: 87 - protein, 6 aa, synthetic construct
  CARBOHYD 5: note = N is linked to the N-linked glycan structure Hex(5)HexNAc(4)Fuc(1)NeuAc(2)
NEEYNK

SEQ ID NO: 88 - protein, 16 aa, synthetic construct
  CARBOHYD 15: note = N is linked to the glycan structure Hex(7)HexNAc(6)Fuc(0)NeuAc(1)
SVQEIQATFFYFTPNK

SEQ ID NO: 89 - protein, 24 aa, synthetic construct
  CARBOHYD 15: note = N is linked to the N-linked glycan structure Hex(6)HexNAc(5)Fuc(0)NeuAc(3)
SVQEIQATFFYFTPNKTEDTIFLR

SEQ ID NO: 90 - protein, 17 aa, synthetic construct
  CARBOHYD 9: note = N is linked to the N-linked glycan structure Hex(5)HexNAc(4)Fuc(0)NeuAc(1)
FEVDSPVYNATWSASLK

SEQ ID NO: 91 - protein, 33 aa, synthetic construct; identical to SEQ ID NO: 14
  CARBOHYD 16: note = N is linked to the N-linked glycan structure Hex(5)HexNAc(4)Fuc(0)NeuAc(2)

SEQ ID NO: 92 - protein, 11 aa, synthetic construct
  CARBOHYD 3: note = N is linked to the N-linked glycan structure Hex(5)HexNAc(4)Fuc(1)NeuAc(2)
LGNWSAMPSCK

SEQ ID NO: 93 - protein, 23 aa, synthetic construct
  CARBOHYD 15: note = N is linked to the N-linked glycan structure Hex(5)HexNAc(4)Fuc(1)NeuAc(0)
  CARBOHYD 15: note = N is linked to the N-linked glycan structure Hex(5)HexNAc(4)Fuc(0)NeuAc(2)
TELFSSSCPGGIMLNETGQGYQR

SEQ ID NO: 94 - protein, 32 aa, synthetic construct; identical to SEQ ID NO: 51
  CARBOHYD 5: note = N is linked to the N-linked glycan structure Hex(5)HexNAc(4)Fuc(0)NeuAc(2)

SEQ ID NO: 95 - protein, 20 aa, synthetic construct
  CARBOHYD 2: note = N is linked to the N-linked glycan structure Hex(5)HexNAc(4)Fuc(1)NeuAc(2)
ENLTAPGSDSAVFFEQGTTR

SEQ ID NO: 96 - protein, 6 aa, synthetic construct
  CARBOHYD 2: note = N is linked to the N-linked glycan structure Hex(5)HexNAc(4)Fuc(0)NeuAc(1)
  CARBOHYD 2: note = N is linked to the N-linked glycan structure Hex(5)HexNAc(4)Fuc(0)NeuAc(2)
ANISHK

SEQ ID NO: 97 - protein, 15 aa, synthetic construct
  CARBOHYD 12: note = N is linked to the N-linked glycan structure Hex(5)HexNAc(4)Fuc(1)NeuAc(2)
VCQDCPLLAPLNDTR

SEQ ID NO: 98 - protein, 13 aa, synthetic construct
  CARBOHYD 7: note = N is linked to the N-linked glycan structure Hex(5)HexNAc(4)Fuc(1)NeuAc(2)
SWPAVGNCSSALR

SEQ ID NO: 99 - protein, 16 aa, synthetic construct
  CARBOHYD 7: note = N is linked to the N-linked glycan structure Hex(5)HexNAc(4)Fuc(0)NeuAc(1)
ALPQPQNVTSLLGCTH

SEQ ID NO: 100 - protein, 22 aa, synthetic construct
  CARBOHYD 15: note = N is linked to the N-linked glycan structure Hex(5)HexNAc(4)Fuc(0)NeuAc(2)
CSDGWSFDATTLDDNGTMLFFK

SEQ ID NO: 101 - protein, 13 aa, synthetic construct
  CARBOHYD 5: note = N is linked to the glycan structure Hex(6)HexNAc(5)Fuc(0)NeuAc(2)
  CARBOHYD 9: note = N is linked to the glycan structure Hex(6)HexNAc(5)Fuc(1)NeuAc(3)
NLFLNHSENATAK

SEQ ID NO: 102 - protein, 19 aa, synthetic construct
  CARBOHYD 5: note = N is linked to the N-linked glycan structure Hex(5)HexNAc(4)Fuc(0)NeuAc(2)
VIDFNCTTSSVSSALANTK

SEQ ID NO: 103 - protein, 8 aa, synthetic construct
  CARBOHYD 6: note = A is linked to the N-linked glycan structure Hex(5)HexNAc(4)Fuc(1)NeuAc(2)
DTFVNASR

SEQ ID NO: 104 - protein, 19 aa, synthetic construct
  CARBOHYD 4: note = N is linked to the N-linked glycan structure Hex(5)HexNAc(4)Fuc(0)NeuAc(2)
  CARBOHYD 4: note = N is linked to the N-linked glycan structure Hex(5)HexNAc(4)Fuc(1)NeuAc(2)
  CARBOHYD 4: note = N is linked to the N-linked glycan structure Hex(6)HexNAc(5)Fuc(0)NeuAc(3)
  CARBOHYD 4: note = N is linked to the N-linked glycan structure Hex(6)HexNAc(5)Fuc(1)NeuAc(3)
VLSNNSDANLELINTWVAK

SEQ ID NO: 105 - protein, 21 aa, synthetic construct
  CARBOHYD 9: note = N is linked to the N-linked glycan structure Hex(5)HexNAc(4)Fuc(0)NeuAc(2)
VGQLQLSHNLSLVILVPQNLK

SEQ ID NO: 106 - protein, 27 aa, synthetic construct
  CARBOHYD 18: note = N is linked to the N-linked glycan structure Hex(3)HexNAc(5)Fuc(0)NeuAc(0)
LSLHRPALEDLLLGSEANLTCTLTGLR

SEQ ID NO: 107 - protein, 9 aa, synthetic construct
  CARBOHYD 5: note = N is linked to the glycan structure Hex(3)HexNAc(4)Fuc(1)NeuAc(0)
  CARBOHYD 5: note = N is linked to the N-linked glycan structure Hex(3)HexNAc(5)Fuc(0)NeuAc(0)
  CARBOHYD 5: note = N is linked to the glycan structure Hex(3)HexNAc(5)Fuc(1)NeuAc(0)
EEQYNSTYR

SEQ ID NO: 108 - protein, 9 aa, synthetic construct
  CARBOHYD 5: note = N is linked to the N-linked glycan structure Hex(3)HexNAc(5)Fuc(0)NeuAc(0)
  CARBOHYD 5: note = N is linked to the glycan structure Hex(3)HexNAc(3)Fuc(1)NeuAc(0)
EEQFNSTFR

SEQ ID NO: 109 - protein, 22 aa, synthetic construct
  CARBOHYD 9: note = N is linked to the glycan structure Hex(9)HexNAc(2)Fuc(0)NeuAc(0)
  CARBOHYD 9: note = N is linked to the glycan structure Hex(6)HexNAc(2)Fuc(0)NeuAc(0)
STGKPTLYNVSLVMSDTAGTCY

SEQ ID NO: 110 - protein, 19 aa, synthetic construct
  CARBOHYD 6: note = N is linked to the N-linked glycan structure Hex(6)HexNAc(5)Fuc(0)NeuAc(3)
LQAPLNYTEFQKPICLPSK

SEQ ID NO: 111 - protein, 10 aa, synthetic construct
DLLLPQPDLR

SEQ ID NO: 112 - protein, 11 aa, synthetic construct
DLATVYVDVLK

SEQ ID NO: 113 - protein, 7 aa, synthetic construct
AFLLTPR

SEQ ID NO: 114 - protein, 10 aa, synthetic construct
VNHVTLSQPK

SEQ ID NO: 115 - protein, 14 aa, synthetic construct
SYTITGLQPGTDYK

SEQ ID NO: 116 - protein, 22 aa, synthetic construct
TSESGELHGLTTEEEFVEGIYK

SEQ ID NO: 117 - protein, 9 aa, synthetic construct
  CARBOHYD 8: note = N is linked to the N-linked glycan structure Hex(5)HexNAc(4)Fuc(0)NeuAc(2)
LDVDQALNR

SEQ ID NO: 118 - protein, 13 aa, synthetic construct
  CARBOHYD 12: note = N is linked to the N-linked glycan structure Hex(5)HexNAc(4)Fuc(0)NeuAc(1)
CGLVPVLAENYNK

SEQ ID NO: 119 - protein, 8 aa, synthetic construct
  CARBOHYD 1: note = N is linked to the N-linked glycan structure Hex(5)HexNAc(4)Fuc(0)NeuAc(1)
  CARBOHYD 1: note = N is linked to the glycan structure Hex(6)HexNAc(3)Fuc(0)NeuAc(1)
NGSLFAFR

SEQ ID NO: 120 - protein, 418 aa, Homo sapiens; identical to SEQ ID NO: 24
  CARBOHYD 107: note = N is linked to the N-linked glycan structure Hex(5)HexNAc(4)Fuc(1)NeuAc(2)
  CARBOHYD 107: note = N is linked to the N-linked glycan structure Hex(6)HexNAc(5)Fuc(1)NeuAc(1)
  CARBOHYD 70: note = N is linked to the N-linked glycan structure Hex(5)HexNAc(4)Fuc(0)NeuAc(2

SEQ ID NO: 121 - protein, 495 aa, Homo sapiens
  CARBOHYD 179: note = N is linked to the N-linked glycan structure  Hex(5)H exNAc(4)Fuc(0)NeuAc(2)
MSMLVVFLLLWGVTWGPVTEAAIFYETQPSLWAESESLLKPLANVTLTCQAHLETPDFQLFKNGVAQEPVHLDSPAIKHQFLLTGDTQGRYRCRSGLSTGWTQLSKLLELTGPKSLPAPWLSMAPVSWITPGLKTTAVCRGVLRGVTFLLRREGDHEFLEVPEAQEDVEATFPVHQPGNYSCSYRTDGEGALSEPSATVTIEELAAPPPPVLMHHGESSQVLHPGNKVTLTCVAPLSGVDFQLRRGEKELLVPRSSTSPDRIFFHLNAVALGDGGHYTCRYRLHDNQNGWSGDSAPVELILSDETLPAPEFSPEPESGRALRLRCLAPLEGARFALVREDRGGRRVHRFQSPAGTEALFELHNISVADSANYSCVYVDLKPPFGGSAPSERLELHVDGPPPRPQLRATWSGAVLAGRDAVLRCEGPIPDVTFELLREGETKAVKTVRTPGAAANLELIFVGPQHAGNYRCRYRSWVPHTFESELSDPVELLVAES

SEQ ID NO: 122 - protein, 1474 aa, Homo sapiens; identical to SEQ ID NO: 25
  CARBOHYD 247: note = N is linked to the glycan structure Hex(5)HexNAc(2)Fuc(0)NeuAc(0)
  CARBOHYD 247: note = N is linked to the N-linked glycan structure Hex(5)HexNAc(4)Fuc(0)NeuAc(1)
  CARBOHYD 55: note = N is linked to the N-linked glycan structure Hex(5)HexNAc(4)Fuc(1)NeuAc(2)
  CARBOHYD 869: note = N is linked to the N-linked glycan structure  Hex(5)H exNAc(4)Fuc(0)NeuAc(1)
  CARBOHYD 869: note = N is linked to the N-linked glycan structure Hex(5)HexNAc(4)Fuc(0)NeuAc(2)
  CARBOHYD 869: note = N is linked to the glycan structure Hex(6)HexNAc(3)Fuc(0)NeuAc(1)

SEQ ID NO: 123 - protein, 423 aa, Homo sapiens; identical to SEQ ID NO: 26
  CARBOHYD 271: note = N is linked to the N-linked glycan structure Hex(6)HexNAc(5)Fuc(1)NeuAc(2)

SEQ ID NO: 124 - protein, 201 aa, Homo sapiens; identical to SEQ ID NO: 27
  CARBOHYD 93: note = N is linked to the  glycan structure Hex(7)HexNAc(6)Fuc(1)NeuAc(4)

SEQ ID NO: 125 - protein, 201 aa, Homo sapiens; identical to SEQ ID NO: 27
  CARBOHYD 56: note = N is linked to the N-linked glycan structure Hex(5)HexNAc(4)Fuc(1)NeuAc(2)
  CARBOHYD 72: note = N is linked to the glycan structure Hex(7)HexNAc(6)Fuc(0)NeuAc(1)
  CARBOHYD 72: note = N is linked to the N-linked glycan structure Hex(6)HexNAc(5)Fuc(0)NeuAc(3)

SEQ ID NO: 126 - protein, 201 aa, Homo sapiens; identical to SEQ ID NO: 28
  CARBOHYD 72: note = N is linked to the N-linked glycan structure  Hex(6)H exNAc(5)Fuc(0)NeuAc(3)
  CARBOHYD 72: note = N is linked to the glycan structure Hex(7)HexNAc(6)Fuc(0)NeuAc(1)
  CARBOHYD 56: note = N is linked to the N-linked glycan structure  Hex(5)H exNAc(4)Fuc(1)NeuAc(2)

SEQ ID NO: 127 - protein, 4563 aa, Homo sapiens; identical to SEQ ID NO: 29
  CARBOHYD 3895: note = N is linked to the N-linked glycan structure  Hex(5)H exNAc(4)Fuc(0)NeuAc(1)
  CARBOHYD 983: note = N is linked to the N-linked glycan structure  Hex(5)H exNAc(4)Fuc(0)NeuAc(2)

SEQ ID NO: 128 - protein, 345 aa, Homo sapiens
  CARBOHYD 253: note = N is linked to the N-linked glycan structure  Hex(5)H exNAc(4)Fuc(1)NeuAc(2)
MISPVLILFSSFLCHVAIAGRTCPKPDDLPFSTVVPLKTFYEPGEEITYSCKPGYVSRGGMRKFICPLTGLWPINTLKCTPRVCPFAGILENGAVRYTTFEYPNTISFSCNTGFYLNGADSAKCTEEGKWSPELPVCAPIICPPPSIPTFATLRVYKPSAGNNSLYRDTAVFECLPQHAMFGNDTITCTTHGNWTKLPECREVKCPFPSRPDNGFVNYPAKPTLYYKDKATFGCHDGYSLDGPEEIECTKLGNWSAMPSCKASCKVPVKKATVVYQGERVKIQEKFKNGMLHGDKVSFFCKNKEKKCSYTEDAQCIDGTIEVPKCFKEHSSLAFWKTDASDVKPC

SEQ ID NO: 129 - protein, 188 aa, Homo sapiens; identical to SEQ ID NO: 67
  CARBOHYD 135: note = N is linked to the N-linked glycan structure  Hex(5)H exNAc(4)Fuc(0)NeuAc(1)
  CARBOHYD 135: note = N is linked to the N-linked glycan structure Hex(5)HexNAc(4)Fuc(0)NeuAc(2)

SEQ ID NO: 130 - protein, 688 aa, Homo sapiens; identical to SEQ ID NO: 68
  CARBOHYD 174: note = N is linked to the N-linked glycan structure  Hex(5)H exNAc(4)Fuc(0)NeuAc(2)

SEQ ID NO: 131 - protein, 1065 aa, Homo sapiens
  CARBOHYD 397: note = N is linked to the N-linked glycan structure Hex(5)HexNAc(4)Fuc(1)NeuAc(2)
MKILILGIFLFLCSTPAWAKEKHYYIGIIETTWDYASDHGEKKLISVDTEHSNIYLQNGPDRIGRLYKKALYLQYTDETFRTTIEKPVWLGFLGPIIKAETGDKVYVHLKNLASRPYTFHSHGITYYKEHEGAIYPDNTTDFQRADDKVYPGEQYTYMLLATEEQSPGEGDGNCVTRIYHSHIDAPKDIASGLIGPLIICKKDSLDKEKEKHIDREFVVMFSVVDENFSWYLEDNIKTYCSEPEKVDKDNEDFQESNRMYSVNGYTFGSLPGLSMCAEDRVKWYLFGMGNEVDVHAAFFHGQALTNKNYRIDTINLFPATLFDAYMVAQNPGEWMLSCQNLNHLKAGLQAFFQVQECNKSSSKDNIRGKHVRHYYIAAEEIIWNYAPSGIDIFTKENLTAPGSDSAVFFEQGTTRIGGSYKKLVYREYTDASFTNRKERGPEEEHLGILGPVIWAEVGDTIRVTFHNKGAYPLSIEPIGVRFNKNNEGTYYSPNYNPQSRSVPPSASHVAPTETFTYEWTVPKEVGPTNADPVCLAKMYYSAVDPTKDIFTGLIGPMKICKKGSLHANGRQKDVDKEFYLFPTVFDENESLLLEDNIRMFTTAPDQVDKEDEDFQESNKMHSMNGFMYGNQPGLTMCKGDSVVWYLFSAGNEADVHGIYFSGNTYLWRGERRDTANLFPQTSLTLHMWPDTEGTFNVECLTTDHYTGGMKQKYTVNQCRRQSEDSTFYLGERTYYIAAVEVEWDYSPQREWEKELHHLQEQNVSNAFLDKGEFYIGSKYKKVVYRQYTDSTFRVPVERKAEEEHLGILGPQLHADVGDKVKIIFKNMATRPYSIHAHGVQTESSTVTPTLPGETLTYVWKIPERSGAGTEDSACIPWAYYSTVDQVKDLYSGLIGPLIVCRRPYLKVFNPRRKLEFALLFLVFDENESWYLDDNIKTYSDHPEKVNKDDEEFIESNKMHAINGRMFGNLQGLTMHVGDEVNWYLMGMGNEIDLHTVHFHGHSFQYKHRGVYSSDVFDIFPGTYQTLEMFPRTPGIWLLHCHVTDHIHAGMETTYTVLQNEDTKSG

SEQ ID NO: 132 - protein, 1676 aa, Homo sapiens
  CARBOHYD 741: note = N is linked to the N-linked glycan structure  Hex(5)H exNAc(4)Fuc(0)NeuAc(1)
  CARBOHYD 741: note = N is linked to the N-linked glycan structure  Hex(5)H exNAc(4)Fuc(0)NeuAc(2)
MGLLGILCFLIFLGKTWGQEQTYVISAPKIFRVGASENIVIQVYGYTEAFDATISIKSYPDKKFSYSSGHVHLSSENKFQNSAILTIQPKQLPGGQNPVSYVYLEVVSKHFSKSKRMPITYDNGFLFIHTDKPVYTPDQSVKVRVYSLNDDLKPAKRETVLTFIDPEGSEVDMVEEIDHIGIISFPDFKIPSNPRYGMWTIKAKYKEDFSTTGTAYFEVKEYVLPHFSVSIEPEYNFIGYKNFKNFEITIKARYFYNKVVTEADVYITFGIREDLKDDQKEMMQTAMQNTMLINGIAQVTFDSETAVKELSYYSLEDLNNKYLYIAVTVIESTGGFSEEAEIPGIKYVLSPYKLNLVATPLFLKPGIPYPIKVQVKDSLDQLVGGVPVTLNAQTIDVNQETSDLDPSKSVTRVDDGVASFVLNLPSGVTVLEFNVKTDAPDLPEENQAREGYRAIAYSSLSQSYLYIDWTDNHKALLVGEHLNIIVTPKSPYIDKITHYNYLILSKGKIIHFGTREKFSDASYQSINIPVTQNMVPSSRLLVYYIVTGEQTAELVSDSVWLNIEEKCGNQLQVHLSPDADAYSPGQTVSLNMATGMDSWVALAAVDSAVYGVQRGAKKPLERVFQFLEKSDLGCGAGGGLNNANVFHLAGLTFLTNANADDSQENDEPCKEILRPRRTLQKKIEEIAAKYKHSVVKKCCYDGACVNNDETCEQRAARISLGPRCIKAFTECCVVASQLRANISHKDMQLGRLHMKTLLPVSKPEIRSYFPESWLWEVHLVPRRKQLQFALPDSLTTWEIQGVGISNTGICVADTVKAKVFKDVFLEMNIPYSVVRGEQIQLKGTVYNYRTSGMQFCVKMSAVEGICTSESPVIDHQGTKSSKCVRQKVEGSSSHLVTFTVLPLEIGLHNINFSLETWFGKEILVKTLRVVPEGVKRESYSGVTLDPRGIYGTISRRKEFPYRIPLDLVPKTEIKRILSVKGLLVGEILSAVLSQEGINILTHLPKGSAEAELMSVVPVFYVFHYLETGNHWNIFHSDPLIEKQKLKKKLKEGMLSIMSYRNADYSYSVWKGGSASTWLTAFALRVLGQVNKYVEQNQNSICNSLLWLVENYQLDNGSFKENSQYQPIKLQGTLPVEARENSLYLTAFTVIGIRKAFDICPLVKIDTALIKADNFLLENTLPAQSTFTLAISAYALSLGDKTHPQFRSIVSALKREALVKGNPPIYRFWKDNLQHKDSSVPNTGTARMVETTAYALLTSLNLKDINYVNPVIKWLSEEQRYGGGFYSTQDTINAIEGLTEYSLLVKQLRLSMDIDVSYKHKGALHNYKMTDKNFLGRPVEVLLNDDLIVSTGFGSGLATVHVTTVVHKTSTSEEVCSFYLKIDTQDIEASHYRGYGNSDYKRIVACASYKPSREESSSGSSHAVMDISLPTGISANEEDLKALVEGVDQLFTDYQIKDGHVILQLNSIPSSDFLCVRFRIFELFEVGFLSPATFTVYEYHRPDKQCTMFYSTSNIKIQKVCEGAACKCVEADCGQMQEELDLTISAETRKQTACKPEIAYAYKVSITSITVENVFVKYKATLLDIYKTGEAVAEKDSEITFIKKVTCTNAELVKGRQYLIMGKEALQIKYNFSFRYIYPLDSLTWIEYWPRDTTCSSCQAFLANLDEFAEDIFLNGC

SEQ ID NO: 133 - protein, 367 aa, Homo sapiens; identical to SEQ ID NO: 38
  CARBOHYD 156: note = N is linked to the N-linked glycan structure  Hex(5)H exNAc(4)Fuc(1)NeuAc(2)

SEQ ID NO: 134 - protein, 462 aa, Homo sapiens; identical to SEQ ID NO: 39
  CARBOHYD 187: note = N is linked to the N-linked glycan structure  Hex(5)H exNAc(4)Fuc(1)NeuAc(2)
  CARBOHYD 453: note = N is linked to the N-linked glycan structure Hex(5)HexNAc(4)Fuc(0)NeuAc(1)
  CARBOHYD 64: note = N is linked to the N-linked glycan structure  Hex(5)H exNAc(4)Fuc(0)NeuAc(2)

SEQ ID NO: 135 - protein, 406 aa, Homo sapiens
  CARBOHYD 207: note = N is linked to the  glycan structure Hex(6)HexNAc(5)Fuc(0)NeuAc(2)
  CARBOHYD 211: note = N is linked to the glycan structure Hex(6)HexNAc(5)Fuc(1)NeuAc(3)
MSALGAVIALLLWGQLFAVDSGNDVTDIADDGCPKPPEIAHGYVEHSVRYQCKNYYKLRTEGDGVYTLNDKKQWINKAVGDKLPECEADDGCPKPPEIAHGYVEHSVRYQCKNYYKLRTEGDGVYTLNNEKQWINKAVGDKLPECEAVCGKPKNPANPVQRILGGHLDAKGSFPWQAKMVSHHNLTTGATLINEQWLLTTAKNLFLNHSENATAKDIAPTLTLYVGKKQLVEIEKVVLHPNYSQVDIGLIKLKQKVSVNERVMPICLPSKDYAEVGRVGYVSGWGRNANFKFTDHLKYVMLPVADQDQCIRHYEGSTVPEKKTPKSPVGVQPILNEHTFCAGMSKYQEDTCYGDAGSAFAVHDLEEDTWYATGILSFDKSCAVAEYGVYVKVTSIQDWVQKTIAEN

SEQ ID NO: 136 - protein, 525 aa, Homo sapiens; identical to SEQ ID NO: 31
  CARBOHYD 125: note = N is linked to t+he N-linked glycan structure Hex(5)HexNAc(4)Fuc(0)NeuAc(2)

SEQ ID NO: 137 - protein, 500 aa, Homo sapiens
  CARBOHYD 238: note = N is linked to the N-linked glycan structure Hex(5)HexNAc(4)Fuc(1)NeuAc(2)
  CARBOHYD 253: note = N is linked to the N-linked glycan structure Hex(5)HexNAc(4)Fuc(0)NeuAc(2)
  CARBOHYD 253: note = structure Hex(5)HexNAc(4)Fuc(1)NeuAc(2)
  CARBOHYD 253: note = N is linked to the  glycan structure Hex(6)HexNAc(5)Fuc(0)NeuAc(3)
  CARBOHYD 253: note = N is linked to the N-linked glycan structure Hex(6)HexNAc(5)Fuc(1)NeuAc(3)
  CARBOHYD 352: note = N is linked to the N-linked glycan structure Hex(5)HexNAc(4)Fuc(0)NeuAc(2)
MASRLTLLTLLLLLLAGDRASSNPNATSSSSQDPESLQDRGEGKVATTVISKMLFVEPILEVSSLPTTNSTTNSATKITANTTDEPTTQPTTEPTTQPTIQPTQPTTQLPTDSPTQPTTGSFCPGPVTLCSDLESHSTEAVLGDALVDFSLKLYHAFSAMKKVETNMAFSPFSIASLLTQVLLGAGENTKTNLESILSYPKDFTCVHQALKGFTTKGVTSVSQIFHSPDLAIRDTFVNASRTLYSSSPRVLSNNSDANLELINTWVAKNTNNKISRLLDSLPSDTRLVLLNAIYLSAKWKTTFDPKKTRMEPFHFKNSVIKVPMMNSKKYPVAHFIDQTLKAKVGQLQLSHNLSLVILVPQNLKHRLEDMEQALSPSVFKAIMEKLEMSKFQPTLLTLPRIKVTTSQDMLSIMEKLEFFDFSYDLNLCGLTEDPDLQVSAMQHQTVLELTETGVEAAAASAISVARTLLVFEVQQPFLFVLWDQQHKFPVFMGRVYDPRA

SEQ ID NO: 138 - protein, 398 aa, Homo sapiens; identical to SEQ ID NO: 32
  CARBOHYD 144: note = N is linked to the N-linked glycan structure  Hex(3)H exNAc(5)Fuc(0)NeuAc(0)
  CARBOHYD 131: note = R is linked to the N-linked glycan structure  Hex(3)H exNAc(5)Fuc(0)NeuAc(0)

SEQ ID NO: 139 - protein, 391 aa, Homo sapiens; identical to SEQ ID NO: 33
  CARBOHYD 144: note = G is linked to the N-linked glycan structure Hex(3)HexNAc(5)Fuc(0)NeuAc(0)
  CARBOHYD 131: note = N is linked to the N-linked glycan structure  Hex(3)H exNAc(5)Fuc(0)NeuAc(0)

SEQ ID NO: 140 - protein, 399 aa, Homo sapiens; identical to SEQ ID NO: 34
  CARBOHYD 180: note = N is linked to the  glycan structure Hex(3)HexNAc(4)Fuc(1)NeuAc(0)
  CARBOHYD 180: note = N is linked to the N-linked glycan structure Hex(3)HexNAc(5)Fuc(0)NeuAc(0)
  CARBOHYD 180: note = N is linked to the glycan structure Hex(3)HexNAc(5)Fuc(1)NeuAc(0)

SEQ ID NO: 141 - protein, 395 aa, Homo sapiens; identical to SEQ ID NO: 35
  CARBOHYD 176: note = N is linked to the N-linked glycan structure  Hex(3)H exNAc(5)Fuc(0)NeuAc(0)

SEQ ID NO: 142 - protein, 474 aa, Homo sapiens
  CARBOHYD 440: note = D is linked to the glycan structure Hex(9)HexNAc(2)Fuc(0)NeuAc(0)
GSASAPTLFPLVSCENSPSDTSSVAVGCLAQDFLPDSITFSWKYKNNSDISSTRGFPSVLRGGKYAATSQVLLPSKDVMQGTDEHVVCKVQHPNGNKEKNVPLPVIAELPPKVSVFVPPRDGFFGNPRKSKLICQATGFSPRQIQVSWLREGKQVGSGVTTDQVQAEAKESGPTTYKVTSTLTIKESDWLGQSMFTCRVDHRGLTFQQNASSMCVPDQDTAIRVFAIPPSFASIFLTKSTKLTCLVTDLTTYDSVTISWTRQNGEAVKTHTNISESHPNATFSAVGEASICEDDWNSGERFTCTVTHTDLPSPLKQTISRPKGVALHRPDVYLLPPAREQLNLRESATITCLVTGFSPADVFVQWMQRGQPLSPEKYVTSAPMPEPQAPGRYFAHSILTVSEEEWNTGETYTCVVAHEALPNRVTERTVDKSTEGEVSADEEGFENLWATASTFIVLFLLSLFYSTTVTLFKVK

SEQ ID NO: 143 - protein, 638 aa, Homo sapiens; identical to SEQ ID NO: 36
  CARBOHYD 494: note = N is linked to the N-linked glycan structure Hex(6)HexNAc(5)Fuc(0)NeuAc(3)

SEQ ID NO: 144 - protein, 347 aa, Homo sapiens
MSSWSRQRPKSPGGIQPHVSRTLFLLLLLAASAWGVTLSPKDCQVFRSDHGSSISCQPPAEIPGYLPADTVHLAVEFFNLTHLPANLLQGASKLQELHLSSNGLESLSPEFLRPVPQLRVLDLTRNALTGLPPGLFQASATLDTLVLKENQLEVLEVSWLHGLKALGHLDLSGNRLRKLPPGLLANFTLLRTLDLGENQLETLPPDLLRGPLQLERLHLEGNKLQVLGKDLLLPQPDLRYLFLNGNKLARVAAGAFQGLRQLDMLDLSNNSLASVPEGLWASLGQPNWDMRDGFDISGNPWICDQNLSDLYRWLQAQKDKMFSQNDTRCAGPEAVKGQTLLAVAKSQ

SEQ ID NO: 145 - protein, 267 aa, Homo sapiens
MKAAVLTLAVLFLTGSQARHFWQQDEPPQSPWDRVKDLATVYVDVLKDSGRDYVSQFEGSALGKQLNLKLLDNWDSVTSTFSKLREQLGPVTQEFWDNLEKETEGLRQEMSKDLEEVKAKVQPYLDDFQKKWQEEMELYRQKVEPLRAELQEGARQKLHELQEKLSPLGEEMRDRARAHVDALRTHLAPYSDELRQRLAARLEALKENGGARLAEYHAKATEHLSTLSEKAKPALEDLRQGLLPVLESFKVSFLSALEEYTKKLNTQ

SEQ ID NO: 146 - protein, 188 aa, Homo sapiens; identical to SEQ ID NO: 67

SEQ ID NO: 147 - protein, 119 aa, Homo sapiens
MSRSVALAVLALLSLSGLEAIQRTPKIQVYSRHPAENGKSNFLNCYVSGFHPSDIEVDLLKNGERIEKVEHSDLSFSKDWSFYLLYYTEFTPTEKDEYACRVNHVTLSQPKIVKWDRDM

SEQ ID NO: 148 - protein, 2477 aa, Homo sapiens
MLRGPGPGLLLLAVQCLGTAVPSTGASKSKRQAQQMVQPQSPVAVSQSKPGCYDNGKHYQINQQWERTYLGNALVCTCYGGSRGFNCESKPEAEETCFDKYTGNTYRVGDTYERPKDSMIWDCTCIGAGRGRISCTIANRCHEGGQSYKIGDTWRRPHETGGYMLECVCLGNGKGEWTCKPIAEKCFDHAAGTSYVVGETWEKPYQGWMMVDCTCLGEGSGRITCTSRNRCNDQDTRTSYRIGDTWSKKDNRGNLLQCICTGNGRGEWKCERHTSVQTTSSGSGPFTDVRAAVYQPQPHPQPPPYGHCVTDSGVVYSVGMQWLKTQGNKQMLCTCLGNGVSCQETAVTQTYGGNSNGEPCVLPFTYNGRTFYSCTTEGRQDGHLWCSTTSNYEQDQKYSFCTDHTVLVQTRGGNSNGALCHFPFLYNNHNYTDCTSEGRRDNMKWCGTTQNYDADQKFGFCPMAAHEEICTTNEGVMYRIGDQWDKQHDMGHMMRCTCVGNGRGEWTCIAYSQLRDQCIVDDITYNVNDTFHKRHEEGHMLNCTCFGQGRGRWKCDPVDQCQDSETGTFYQIGDSWEKYVHGVRYQCYCYGRGIGEWHCQPLQTYPSSSGPVEVFITETPSQPNSHPIQWNAPQPSHISKYILRWRPKNSVGRWKEATIPGHLNSYTIKGLKPGVVYEGQLISIQQYGHQEVTRFDFTTTSTSTPVTSNTVTGETTPFSPLVATSESVTEITASSFVVSWVSASDTVSGFRVEYELSEEGDEPQYLDLPSTATSVNIPDLLPGRKYIVNVYQISEDGEQSLILSTSQTTAPDAPPDTTVDQVDDTSIVVRWSRPQAPITGYRIVYSPSVEGSSTELNLPETANSVTLSDLQPGVQYNITIYAVEENQESTPVVIQQETTGTPRSDTVPSPRDLQFVEVTDVKVTIMWTPPESAVTGYRVDVIPVNLPGEHGQRLPISRNTFAEVTGLSPGVTYYFKVFAVSHGRESKPLTAQQTTKLDAPTNLQFVNETDSTVLVRWTPPRAQITGYRLTVGLTRRGQPRQYNVGPSVSKYPLRNLQPASEYTVSLVAIKGNQESPKATGVFTTLQPGSSIPPYNTEVTETTIVITWTPAPRIGFKLGVRPSQGGEAPREVTSDSGSIVVSGLTPGVEYVYTIQVLRDGQERDAPIVNKVVTPLSPPTNLHLEANPDTGVLTVSWERSTTPDITGYRITTTPTNGQQGNSLEEVVHADQSSCTFDNLSPGLEYNVSVYTVKDDKESVPISDTIIPEVPQLTDLSFVDITDSSIGLRWTPLNSSTIIGYRITVVAAGEGIPIFEDFVDSSVGYYTVTGLEPGIDYDISVITLINGGESAPTTLTQQTAVPPPTDLRFTNIGPDTMRVTWAPPPSIDLTNFLVRYSPVKNEEDVAELSISPSDNAVVLTNLLPGTEYVVSVSSVYEQHESTPLRGRQKTGLDSPTGIDFSDITANSFTVHWIAPRATITGYRIRHHPEHFSGRPREDRVPHSRNSITLTNLTPGTEYVVSIVALNGREESPLLIGQQSTVSDVPRDLEVVAATPTSLLISWDAPAVTVRYYRITYGETGGNSPVQEFTVPGSKSTATISGLKPGVDYTITVYAVTGRGDSPASSKPISINYRTEIDKPSQMQVTDVQDNSISVKWLPSSSPVTGYRVTTTPKNGPGPTKTKTAGPDQTEMTIEGLQPTVEYVVSVYAQNPSGESQPLVQTAVTNIDRPKGLAFTDVDVDSIKIAWESPQGQVSRYRVTYSSPEDGIHELFPAPDGEEDTAELQGLRPGSEYTVSVVALHDDMESQPLIGTQSTAIPAPTDLKFTQVTPTSLSAQWTPPNVQLTGYRVRVTPKEKTGPMKEINLAPDSSSVVVSGLMVATKYEVSVYALKDTLTSRPAQGVVTTLENVSPPRRARVTDATETTITISWRTKTETITGFQVDAVPANGQTPIQRTIKPDVRSYTITGLQPGTDYKIYLYTLNDNARSSPVVIDASTAIDAPSNLRFLATTPNSLLVSWQPPRARITGYIIKYEKPGSPPREVVPRPRPGVTEATITGLEPGTEYTIYVIALKNNQKSEPLIGRKKTDELPQLVTLPHPNLHGPEILDVPSTVQKTPFVTHPGYDTGNGIQLPGTSGQQPSVGQQMIFEEHGFRRTTPPTTATPIRHRPRPYPPNVGEEIQIGHIPREDVDYHLYPHGPGLNPNASTGQEALSQTTISWAPFQDTSEYIISCHPVGTDEEPLQFRVPGTSTSATLTGLTRGATYNVIVEALKDQQRHKVREEVVTVGNSVNEGLNQPTDDSCFDPYTVSHYAVGDEWERMSESGFKLLCQCLGFGSGHFRCDSSRWCHDNGVNYKIGEKWDRQGENGQMMSCTCLGNGKGEFKCDPHEATCYDDGKTYHVGEQWQKEYLGAICSCTCFGGQRGWRCDNCRRPGGEPSPEGTTGQSYNQYSQRYHQRTNTNVNCPIECFMPLDVQADREDSRE

SEQ ID NO: 149 - protein, 147 aa, Homo sapiens
MASHRLLLLCLAGLVFVSEAGPTGTGESKCPLMVKVLDAVRGSPAINVAVHVFRKAADDTWEPFASGKTSESGELHGLTTEEEFVEGIYKVEIDTKSYWKALGISPFHEHAEVVFTANDSGPRRYTIAALLSPYSYSTTAVVTNPKE

SEQ ID NO: 150 - protein, 402 aa, Homo sapiens
  CARBOHYD 380: note = N is linked to the N-linked glycan structure  Hex(5)H exNAc(4)Fuc(0)NeuAc(2)
MESRGPLATSRLLLLLLLLLLRHTRQGWALRPVLPTQSAHDPPAVHLSNGPGQEPIAVMTFDLTKITKTSSSFEVRTWDPEGVIFYGDTNPKDDWFMLGLRDGRPEIQLHNHWAQLTVGAGPRLDDGRWHQVEVKMEGDSVLLEVDGEEVLRLRQVSGPLTSKRHPIMRIALGGLLFPASNLRLPLVPALDGCLRRDSWLDKQAEISASAPTSLRSCDVESNPGIFLPPGTQAEFNLRDIPQPHAEPWAFSLDLGLKQAAGSGHLLALGTPENPSWLSLHLQDQKVVLSSGSGPGLDLPLVLGLPLQLKLSMSRVVLSQGSKMKALALPPLGLAPLLNLWAKPQGRLFLGALPGEDSSTSFCLNGLWAQGQRLDVDQALNRSHEIWTHSCPQSPGNGTDASH

SEQ ID NO: 151 - protein, 698 aa, Homo sapiens; identical to SEQ ID NO: 76
  CARBOHYD 432: note = N is linked to the N-linked glycan structure  Hex(5)H exNAc(4)Fuc(0)NeuAc(1)

SEQ ID NO: 152 - protein, 478 aa, Homo sapiens; identical to SEQ ID NO: 69
  CARBOHYD 169: note = N is linked to the N-linked glycan structure  Hex(5)H exNAc(4)Fuc(0)NeuAc(1)

SEQ ID NO: 153 - protein, 500 aa, synthetic construct; identical to SEQ ID NO: 137

SEQ ID NO: 154 - protein, 330 aa, synthetic construct [sequence omitted]

SEQ ID NO: 155 - protein, 353 aa, synthetic construct
  CARBOHYD 144: note = N is linked to the N-linked glycan structure Hex(4)HexNAc(5)Fuc(0)NeuAc(0)
  CARBOHYD 144: note = N is linked to the N-linked glycan structure Hex(5)HexNAc(4)Fuc(0)NeuAc(2)
  CARBOHYD 144: note = N is linked to the N-linked glycan structure Hex(3)HexNAc(5)Fuc(0)NeuAc(0)
  CARBOHYD 144: note = N is linked to the N-linked glycan structure Hex(5)HexNAc(4)Fuc(0)NeuAc(0)
  CARBOHYD 144: note = N is linked to the N-linked glycan structure Hex(5)HexNAc(4)Fuc(0)NeuAc(1)
  CARBOHYD 144: note = N is linked to the glycan structure Hex(4)HexNAc(5)Fuc(0)NeuAc(1)
ASPTSPKVFPLSLCSTQPDGNVVIACLVQGFFPQEPLSVTWSESGQGVTARNFPPSQDASGDLYTTSSQLTLPATQCLAGKSVTCHVKHYTNPSQDVTVPCPVPSTPPTPSPSTPPTPSPSCCHPRLSLHRPALEDLLLGSEANLTCTLTGLRDASGVTFTWTPSSGKSAVQGPPERDLCGCYSVSSVLPGCAEPWNHGKTFTCTAAYPESKTPLTATLSKSGNTFRPEVHLLPPPSEELALNELVTLTCLARGFSPKDVLVRWLQGSQELPREKYLTWASRQEPSQGTTTFAVTSILRVAAEDWKKGDTFSCMVGHEALPLAFTQKTIDRLAGKPTHVNVSVVMAEVDGTCY

SEQ ID NO: 156 - protein, 298 aa, synthetic construct
MVRMVPVLLSLLLLLGPAVPQENQDGRYSLTYIYTGLSKHVEDVPAFQALGSLNDLQFFRYNSKDRKSQPMGLWRQVEGMEDWKQDSQLQKAREDIFMETLKDIVEYYNDSNGSHVLQGRFGCEIENNRSSGAFWKYYYDGKDYIEFNKEIPAWVPFDPAAQITKQKWEAEPVYVQRAKAYLEEECPATLRKYLKYSKNILDRQDPPSVVVTSHQAPGEKKKLKCLAYDFYPGKIDVHWTRAGEVQEPELRGDVLHNGNGTYQSWVVVAVPPQDTAPYSCHVQHSSLAQPLVVPWEAS

SEQ ID NO: 157 - protein, 326 aa, synthetic construct
  CARBOHYD 297: note = N is linked to the glycan structure Hex(5)HexNAc(5)Fuc(1)NeuAc(0)
  CARBOHYD 176: note = N is linked to the glycan structure Hex(3)HexNAc(3)Fuc(1)NeuAc(0)
  CARBOHYD 175: note = N is linked to the N-linked glycan structure  Hex(3)H exNAc(5)Fuc(0)NeuAc(0)
  CARBOHYD 175: note = N is linked to the glycan structure Hex(4)HexNAc(4)Fuc(1)NeuAc(0)
  CARBOHYD 175: note = N is linked to the N-linked glycan structure Hex(5)HexNAc(4)Fuc(1)NeuAc(0)
ASTKGPSVFPLAPCSRSTSESTAALGCLVKDYFPEPVTVSWNSGALTSGVHTFPAVLQSSGLYSLSSVVTVPSSNFGTQTYTCNVDHKPSNTKVDKTVERKCCVECPPCPAPPVAGPSVFLFPPKPKDTLMISRTPEVTCVVVDVSHEDPEVQFNWYVDGVEVHNAKTKPREEQFNSTFRVVSVLTVVHQDWLNGKEYKCKVSNKGLPAPIEKTISKTKGQPREPQVYTLPPSREEMTKNQVSLTCLVKGFYPSDISVEWESNGQPENNYKTTPPMLDSDGSFFLYSKLTVDKSRWQQGNVFSCSVMHEALHNHYTQKSLSLSPGK

SEQ ID NO: 158 - protein, 201 aa, synthetic construct; identical to SEQ ID NO: 27
  CARBOHYD 72: note = N is linked to the N-linked glycan structure Hex(6)HexNAc(5)Fuc(0)NeuAc(3)
  CARBOHYD 72: note = N is linked to the glycan structure Hex(7)HexNAc(6)Fuc(1)Neu(5)Ac(3)
  CARBOHYD 72: note = N is linked to the glycan structure Hex(7)HexNAc(6)Fuc(0)NeuAc(1)

SEQ ID NO: 159 - protein, 698 aa, synthetic construct
MRLAVGALLVCAVLGLCLAVPDKTVRWCAVSEHEATKCQSFRDHMKSVIPSDGPSVACVKKASYLDCIRAIAANEADAVTLDAGLVYDAYLAPNNLKPVVAEFYGSKEDPQTFYYAVAVVKKDSGFQMNQLRGKKSCHTGLGRSAGWNIPIGLLYCDLPEPRKPLEKAVANFFSGSCAPCADGTDFPQLCQLCPGCGCSTLNQYFGYSGAFKCLKDGAGDVAFVKHSTIFENLANKADRDQYELLCLDNTRKPVDEYKDCHLAQVPSHTVVARSMGGKEDLIWELLNQAQEHFGKDKSKEFQLFSSPHGKDLLFKDSAHGFLKVPPRMDAKMYLGYEYVTAIRNLREGTCPEAPTDECKPVKWCALSHHERLKCDEWSVNSVGKIECVSAETTEDCIAKIMNGEADAMSLDGGFVYIAGKCGLVPVLAENYNKSDNCEDTPEAGYFAIAVVKKSASDLTWDNLKGKKSCHTAVGRTAGWNIPMGLLYNKINHCRFDEFFSEGCAPGSKKDSSLCKLCMGSGLNLCEPNNKEGYYGYTGAFRCLVEKGDVAFVKHQTVPQNTGGKNPDPWAKNLNEKDYELLCLDGTRKPVEEYANCHLARAPNHAVVTRKDKEACVHKILRQQQHLFGSNVTDCSGNFCLFRSETKDLLFRDDTVCLAKLHDRNTYEKYLGEEYVKAVGNLRKCSTSSLLEACTFRRP

SEQ ID NO: 160 - protein, 340 aa, synthetic construct
  CARBOHYD 144: note = G is linked to the N-linked glycan structure Hex(4)HexNAc(5)Fuc(0)NeuAc(0)
  CARBOHYD 144: note = G is linked to the N-linked glycan structure Hex(5)HexNAc(4)Fuc(0)NeuAc(2)
  CARBOHYD 144: note = N is linked to the N-linked glycan structure Hex(3)HexNAc(5)Fuc(0)NeuAc(0)
  CARBOHYD 144: note = N is linked to the N-linked glycan structure Hex(5)HexNAc(4)Fuc(0)NeuAc(0)
  CARBOHYD 144: note = N is linked to the N-linked glycan structure Hex(5)HexNAc(4)Fuc(0)NeuAc(1)
  CARBOHYD 144: note = N is linked to the N-linked glycan structure Hex(4)HexNAc(5)Fuc(0)NeuAc(1)
ASPTSPKVFPLSLDSTPQDGNVVVACLVQGFFPQEPLSVTWSESGQNVTARNFPPSQDASGDLYTTSSQLTLPATQCPDGKSVTCHVKHYTNSSQDVTVPCRVPPPPPCCHPRLSLHRPALEDLLLGSEANLTCTLTGLRDASGATFTWTPSSGKSAVQGPPERDLCGCYSVSSVLPGCAQPWNHGETFTCTAAHPELKTPLTANITKSGNTFRPEVHLLPPPSEELALNELVTLTCLARGFSPKDVLVRWLQGSQELPREKYLTWASRQEPSQGTTTYAVTSILRVAAEDWKKGETFSCMVGHEALPLAFTQKTIDRMAGKPTHINVSVVMAEADGTCY

SEQ ID NO: 161 - protein, 453 aa, synthetic construct
GSASAPTLFPLVSCENSPSDTSSVAVGCLAQDFLPDSITFSWKYKNNSDISSTRGFPSVLRGGKYAATSQVLLPSKDVMQGTDEHVVCKVQHPNGNKEKNVPLPVIAELPPKVSVFVPPRDGFFGNPRKSKLICQATGFSPRQIQVSWLREGKQVGSGVTTDQVQAEAKESGPTTYKVTSTLTIKESDWLGQSMFTCRVDHRGLTFQQNASSMCVPDQDTAIRVFAIPPSFASIFLTKSTKLTCLVTDLTTYDSVTISWTRQNGEAVKTHTNISESHPNATFSAVGEASICEDDWNSGERFTCTVTHTDLPSPLKQTISRPKGVALHRPDVYLLPPAREQLNLRESATITCLVTGFSPADVFVQWMQRGQPLSPEKYVTSAPMPEPQAPGRYFAHSILTVSEEEWNTGETYTCVVAHEALPNRVTERTVDKSTGKPTLYNVSLVMSDTAGTCY

SEQ ID NO: 162 - protein, 201 aa, synthetic construct; identical to SEQ ID NO: 28
  CARBOHYD 72: note = N is linked to the N-linked glycan structure Hex(6)HexNAc(5)Fuc(0)NeuAc(3)
  CARBOHYD 72: note = N is linked to the glycan structure Hex(7)HexNAc(6)Fuc(1)Neu(5)Ac(3)
  CARBOHYD 72: note = N is linked to the glycan structure  Hex(7)HexNAc(6)F uc(0)NeuAc(1)

SEQ ID NO: 163 - protein, 21 aa, synthetic construct
VGQLQLSHNLSLVILVPQNLK

SEQ ID NO: 164 - protein, 19 aa, synthetic construct
VLSNNSDANLELINTWVAK

SEQ ID NO: 165 - protein, 9 aa, synthetic construct
  CARBOHYD 5: note = N is linked to the N-linked glycan structure Hex(5)HexNAc(4)Fuc(1)NeuAc(0)
  CARBOHYD 5: note = N is linked to the glycan structure Hex(3)HexNAc(5)Fuc(1)NeuAc(0)
  CARBOHYD 5: note = N is linked to the N-linked glycan structure Hex(5)HexNAc(4)Fuc(1)NeuAc(1)
  CARBOHYD 5: note = N is linked to the glycan structure Hex(4)HexNAc(5)Fuc(1)NeuAc(0)
  CARBOHYD 5: note = N is linked to the glycan structure Hex(3)HexNAc(4)Fuc(1)NeuAc(0)
  CARBOHYD 5: note = N is linked to the N-linked glycan structure Hex(5)HexNAc(4)Fuc(1)NeuAc(2)
  CARBOHYD 5: note = N is linked to the N-linked glycan structure Hex(3)HexNAc(5)Fuc(0)NeuAc(0)
EEQYNSTYR

SEQ ID NO: 166 - protein, 22 aa, synthetic construct
  CARBOHYD 13: note = N is linked to the N-linked glycan structure Hex(4)HexNAc(5)Fuc(0)NeuAc(0)
PALEDLLLGSEANLTCTLTGLR

SEQ ID NO: 167 - protein, 9 aa, synthetic construct
FGCEIENNR

SEQ ID NO: 168 - protein, 9 aa, synthetic construct
  CARBOHYD 5: note = N is linked to the glycan structure Hex(5)HexNAc(5)Fuc(1)NeuAc(0)
  CARBOHYD 5: note = N is linked to the glycan structure Hex(3)HexNAc(3)Fuc(1)NeuAc(0)
EEQFNSTFR

SEQ ID NO: 169 - protein, 24 aa, synthetic construct
  CARBOHYD 15: note = N is linked to the N-linked glycan structure Hex(6)HexNAc(5)Fuc(0)NeuAc(3)
  CARBOHYD 15: note = N is linked to the glycan structure Hex(7)HexNAc(6)Fuc(1)Neu(5)Ac(3)
SVQEIQATFFYFTPNKTEDTIFLR

SEQ ID NO: 170 - protein, 21 aa, synthetic construct
QQQHLFGSNVTDCSGNFCLFR

SEQ ID NO: 171 - protein, 9 aa, synthetic construct
TPLTANITK

SEQ ID NO: 172 - protein, 16 aa, synthetic construct
  CARBOHYD 15: note = N is linked to the glycan structure Hex(7)HexNAc(6)Fuc(0)NeuAc(1)
SVQEIQATFFYFTPNK

SEQ ID NO: 173 - protein, 27 aa, synthetic construct
  CARBOHYD 18: note = N is linked to the N-linked glycan structure Hex(5)HexNAc(4)Fuc(0)NeuAc(2)
LSLHRPALEDLLLGSEANLTCTLTGLR

SEQ ID NO: 174 - protein, 21 aa, synthetic construct
  CARBOHYD 7: note = N is linked to the glycan structure Hex(5)HexNAc(5)Fuc(0)NeuAc(0)
GLTFQQNASSMCVPDQDTAIR

SEQ ID NO: 175 - protein, 159 aa, synthetic construct; identical to SEQ ID NO: 70

SEQ ID NO: 176 - protein, 402 aa, synthetic construct; identical to SEQ ID NO: 150
  CARBOHYD 380: note = N is linked to the N-linked glycan structure Hex(5)HexNAc(4)Fuc(0)NeuAc(2)

SEQ ID NO: 177 - protein, 423 aa, synthetic construct; identical to SEQ ID NO: 26
  CARBOHYD 106: note = N is linked to the glycan structure Hex(7)HexNAc(6)Fuc(1)NeuAc(4)
  CARBOHYD 106: note = N is linked to the N-linked glycan structure Hex(7)HexNAc(6)Fuc(0)NeuAc(4)
  CARBOHYD 106: note = N is linked to the glycan structure Hex(7)HexNAc(6)Fuc(2)NeuAc(4)
  CARBOHYD 106: note = N is linked to the glycan structure Hex(6)HexNAc(5)Fuc(1)NeuAc(3)
  CARBOHYD 106: note = N is linked to the N-linked glycan structure Hex(6)HexNAc(5)Fuc(0)NeuAc(3)
  CARBOHYD 106: note = N is linked to the N-linked glycan structure Hex(5)HexNAc(4)Fuc(0)NeuAc(2)
  CARBOHYD 106: note = N is linked to the glycan structure Hex(7)HexNAc(6)Fuc(0)NeuAc(3)
  CARBOHYD 127: note = N is linked to the N-linked glycan structure Hex(6)HexNAc(5)Fuc(0)NeuAc(3)
  CARBOHYD 271: note = N is linked to the glycan structure Hex(6)HexNAc(5)Fuc(1)NeuAc(3)

SEQ ID NO: 178 - protein, 934 aa, synthetic construct; identical to SEQ ID NO: 40
  CARBOHYD 324: note = N is linked to the N-linked glycan structure Hex(5)HexNAc(4)Fuc(0)NeuAc(2)
  CARBOHYD 855: note = N is linked to the N-linked glycan structure Hex(5)HexNAc(4)Fuc(0)NeuAc(2)

SEQ ID NO: 179 - protein, 1065 aa, synthetic construct; identical to SEQ ID NO: 131

SEQ ID NO: 180 - protein, 644 aa, synthetic construct
MKLITILFLCSRLLLSLTQESQSEEIDCNDKDLFKAVDAALKKYNSQNQSNNQFVLYRITEATKTVGSDTFYSFKYEIKEGDCPVQSGKTWQDCEYKDAAKAATGECTATVGKRSSTKFSVATQTCQITPAEGPVVTAQYDCLGCVHPISTQSPDLEPILRHGIQYFNNNTQHSSLFMLNEVKRAQRQVVAGLNFRITYSIVQTNCSKENFLFLTPDCKSLWNGDTGECTDNAYIDIQLRIASFSQNCDIYPGKDFVQPPTKICVGCPRDIPTNSPELEETLTHTITKLNAENNATFYFKIDNVKKARVQVVAGKKYFIDFVARETTCSKESNEELTESCETKKLGQSLDCNAEVYVVPWEKKIYPTVNCQPLGMISLMKRPPGFSPFRSSRIGEIKEETTVSPPHTSMAPAQDEERDSGKEQGHTRRHDWGHEKQRKHNLGHGHKHERDQGHGHQRGHGLGHGHEQQHGLGHGHKFKLDDDLEHQGGHVLDHGHKHKHGHGHGKHKNKGKKNGKHNGWKTEHLASSSEDSTTPSAQTQEKTEGPTPIPSLAKPGVTVTFSDFQDSDLIATMMPPISPAPIQSDDDWIPDIQIDPNGLSFNPISDFPDTTSPKCPGRPWKSVSEINPTTQMKESYYFDLTDGLS

SEQ ID NO: 181 - protein, 638 aa, synthetic construct; identical to SEQ ID NO: 36
  CARBOHYD 453: note = N is linked to the N-linked glycan structure Hex(5)HexNAc(4)Fuc(0)NeuAc(2)
  CARBOHYD 308: note = N is linked to the N-linked glycan structure Hex(5)HexNAc(4)Fuc(0)NeuAc(1)
  CARBOHYD 494: note = N is linked to the N-linked glycan structure Hex(5)HexNAc(4)Fuc(0)NeuAc(2)
  CARBOHYD 494: note = N is linked to the N-linked glycan structure Hex(5)HexNAc(4)Fuc(0)NeuAc(1)
  CARBOHYD 494: note = N is linked to the N-linked glycan structure Hex(5)HexNAc(4)Fuc(0)NeuAc(0)
  CARBOHYD 494: note = N is linked to the N-linked glycan structureHex(6)HexNAc(5)Fuc(0)NeuAc(3)
  CARBOHYD 494: note = N is linked to the glycan structure Hex(5)HexNAc(5)Fuc(0)NeuAc(2)
  CARBOHYD 308: note = N is linked to the N-linked glycan structure Hex(5)HexNAc(4)Fuc(0)NeuAc(2)
  CARBOHYD 494: note = N is linked to the N-linked glycan structure Hex(5)HexNAc(4)Fuc(1)NeuAc(0)
  CARBOHYD 127: note = N is linked to the N-linked glycan structure Hex(5)HexNAc(4)Fuc(0)NeuAc(2)

SEQ ID NO: 182 - protein, 485 aa, synthetic construct
MRKRAPQSEMAPAGVSLRATILCLLAWAGLAAGDRVYIHPFHLVIHNESTCEQLAKANAGKPKDPTFIPAPIQAKTSPVDEKALQDQLVLVAAKLDTEDKLRAAMVGMLANFLGFRIYGMHSELWGVVHGATVLSPTAVFGTLASLYLGALDHTADRLQAILGVPWKDKNCTSRLDAHKVLSALQAVQGLLVAQGRADSQAQLLLSTVVGVFTAPGLHLKQPFVQGLALYTPVVLPRSLDFTELDVAAEKIDRFMQAVTGWKTGCSLMGASVDSTLAFNTYVHFQGKMKGFSLLAEPQEFWVDNSTSVSVPMLSGMGTFQHWSDIQDNFSVTQVPFTESACLLLIQPHYASDLDKVEGLTFQQNSLNWMKKLSPRTIHLTMPQLVLQGSYDLQDLLAQAELPAILHTELNLQKLSNDRIRVGEVLNSIFFELEADEREPTESTQQLNKPEVLEVTLNRPFLFAVYDQSATALHFLGRVANPLSTA

SEQ ID NO: 183 - protein, 11 aa, synthetic construct
ENISDPTSPLR

SEQ ID NO: 184 - protein, 9 aa, synthetic construct
  CARBOHYD 8: note = N is linked to the N-linked glycan structure Hex(5)HexNAc(4)Fuc(0)NeuAc(2)
LDVDQALNR

SEQ ID NO: 185 - protein, 20 aa, synthetic construct
  CARBOHYD 2: note = N is linked to the glycan structure  Hex(7)HexNAc(6)F uc(1)NeuAc(4)
  CARBOHYD 2: note = N is linked to the N-linked glycan structure Hex(7)HexNAc(6)Fuc(0)NeuAc(4)
  CARBOHYD 2: note = N is linked to the glycan structure Hex(7)HexNAc(6)Fuc(2)NeuAc(4)
  CARBOHYD 2: note = N is linked to the glycan structure Hex(6)HexNAc(5)Fuc(1)NeuAc(3)
  CARBOHYD 2: note = N is linked to the N-linked glycan structure Hex(6)HexNAc(5)Fuc(0)NeuAc(3)
  CARBOHYD 2: note = N is linked to the N-linked glycan structure Hex(5)HexNAc(4)Fuc(0)NeuAc(2
  CARBOHYD 2: note = N is linked to the glycan structure Hex(7)HexNAc(6)Fuc(0)NeuAc(3)
FNLTETSEAEIHQSFQHLLR

SEQ ID NO: 186 - protein, 7 aa, synthetic construct
  CARBOHYD 3: note = N is linked to the N-linked glycan structure Hex(5)HexNAc(4)Fuc(0)NeuAc(2)
VLNFTTK

SEQ ID NO: 187 - protein, 16 aa, synthetic construct
EHEGAIYPDNTTDFQR

SEQ ID NO: 188 - protein, 19 aa, synthetic construct
IIVPLNNRENISDPTSPLR

SEQ ID NO: 189 - protein, 22 aa, synthetic construct
HGIQYFNNNTQHSSLFMLNEVK

SEQ ID NO: 190 - protein, 14 aa, synthetic construct
AGLQAFFQVQECNK

SEQ ID NO: 191 - protein, 13 aa, synthetic construct
  CARBOHYD 7: note = N is linked to the N-linked glycan structure Hex(5)HexNAc(4)Fuc(0)NeuAc(2)
IYSGILNLSDITK

SEQ ID NO: 192 - protein, 21 aa, synthetic construct
VYIHPFHLVIHNESTCEQLAK

SEQ ID NO: 193 - protein, 18 aa, synthetic construct
  CARBOHYD 13: note = N is linked to the N-linked glycan structure Hex(5)HexNAc(4)Fuc(0)NeuAc(1)
  CARBOHYD 13: note = N is linked to the N-linked glycan structure Hex(5)HexNAc(4)Fuc(0)NeuAc(2)
IYPGVDFGGEELNVTFVK

SEQ ID NO: 194 - protein, 7 aa, synthetic construct
  CARBOHYD 4: note = N is linked to the N-linked glycan structure Hex(5)HexNAc(4)Fuc(0)NeuAc(2)
LSSNSTK

SEQ ID NO: 195 - protein, 12 aa, synthetic construct
  CARBOHYD 6: note = N is linked to the N-linked glycan structure Hex(5)HexNAc(4)Fuc(0)NeuAc(2)
  CARBOHYD 5: note = N is linked to the glycan structure Hex(5)HexNAc(5)Fuc(0)NeuAc(2)
LQAPLNYTEFQK

SEQ ID NO: 196 - protein, 19 aa, synthetic construct
  CARBOHYD 6: note = N is linked to the N-linked glycan structure Hex(5)HexNAc(4)Fuc(0)NeuAc(1)
  CARBOHYD 6: note = N is linked to the N-linked glycan structure Hex(5)HexNAc(4)Fuc(0)NeuAc(0)
  CARBOHYD 6: note = N is linked to the N-linked glycan structure Hex(6)HexNAc(5)Fuc(0)NeuAc(3)
  CARBOHYD 6: note = N is linked to the N-linked glycan structure Hex(5)HexNAc(4)Fuc(0)NeuAc(2)
LQAPLNYTEFQKPICLPSK

SEQ ID NO: 197 - protein, 347 aa, synthetic construct; identical to SEQ ID NO: 144

SEQ ID NO: 198 - protein, 1474 aa, synthetic construct; identical to SEQ ID NO: 25
  CARBOHYD 1424: note = N is linked to the glycan structure Hex(6)HexNAc(5)Fuc(1)NeuAc(1)
  CARBOHYD 869: note = N is linked to the N-linked glycan structure Hex(5)HexNAc(4)Fuc(0)NeuAc(2)
  CARBOHYD 1424: note = N is linked to the N-linked glycan structure Hex(5)HexNAc(4)Fuc(1)NeuAc(1)
  CARBOHYD 1424: note = N is linked to the N-linked glycan structure Hex(5)HexNAc(4)Fuc(1)NeuAc(2)
  CARBOHYD 247: note = N is linked to the glycan structure Hex(5)HexNAc(2)Fuc(0)NeuAc(0)
  CARBOHYD 247: note = N is linked to the N-linked glycan structure Hex(5)HexNAc(4)Fuc(0)NeuAc(1)
  CARBOHYD 869: note = N is linked to the N-linked glycan structure Hex(5)HexNAc(4)Fuc(0)NeuAc(1)

SEQ ID NO: 199 - protein, 423 aa, synthetic construct; identical to SEQ ID NO: 26
  CARBOHYD 127: note = N is linked to the N-linked glycan structure Hex(6)HexNAc(5)Fuc(0)NeuAc(3)
  CARBOHYD 271: note = N is linked to the glycan structure Hex(6)HexNAc(5)Fuc(1)NeuAc(3)

SEQ ID NO: 200 - protein, 201 aa, synthetic construct; identical to SEQ ID NO: 27

SEQ ID NO: 201 - protein, 201 aa, synthetic construct; identical to SEQ ID NO: 28

SEQ ID NO: 202 - protein, 4563 aa, synthetic construct; identical to SEQ ID NO: 29
  CARBOHYD 3895: note = N is linked to the N-linked glycan structure Hex(5)HexNAc(4)Fuc(0)NeuAc(1)
  CARBOHYD 3411: note = N is linked to the glycan structure Hex(5)HexNAc(3)Fuc(0)NeuAc(1)
  CARBOHYD 983: note = N is linked to the N-linked glycan structure Hex(5)HexNAc(4)Fuc(0)NeuAc(2)

SEQ ID NO: 203 - protein, 188 aa, synthetic construct; identical to SEQ ID NO: 67
  CARBOHYD 135: note = N is linked to the N-linked glycan structure Hex(5)HexNAc(4)Fuc(0)NeuAc(2)

SEQ ID NO: 204 - protein, 119 aa, synthetic construct; identical to SEQ ID NO: 147

SEQ ID NO: 205 - protein, 688 aa, synthetic construct; identical to SEQ ID NO: 68

SEQ ID NO: 206 - protein, 1065 aa, synthetic construct; identical to SEQ ID NO: 131

SEQ ID NO: 207 - protein, 583 aa, synthetic construct
MKLLHVFLLFLCFHLRFCKVTYTSQEDLVEKKCLAKKYTHLSCDKVFCQPWQRCIEGTCVCKLPYQCPKNGTAVCATNRRSFPTYCQQKSLECLHPGTKFLNNGTCTAEGKFSVSLKHGNTDSEGIVEVKLVDQDKTMFICKSSWSMREANVACLDLGFQQGADTQRRFKLSDLSINSTECLHVHCRGLETSLAECTFTKRRTMGYQDFADVVCYTQKADSPMDDFFQCVNGKYISQMKACDGINDCGDQSDELCCKACQGKGFHCKSGVCIPSQYQCNGEVDCITGEDEVGCAGFASVTQEETEILTADMDAERRRIKSLLPKLSCGVKNRMHIRRKRIVGGKRAQLGDLPWQVAIKDASGITCGGIYIGGCWILTAAHCLRASKTHRYQIWTTVVDWIHPDLKRIVIEYVDRIIFHENYNAGTYQNDIALIEMKKDGNKKDCELPRSIPACVPWSPYLFQPNDTCIVSGWGREKDNERVFSLQWGEVKLISNCSKFYGNRFYEKEMECAGTYDGSIDACKGDSGGPLVCMDANNVTYVWGVVSWGENCGKPEFPGVYTKVANYFDWISYHVGRPFISQYNV

SEQ ID NO: 208 - protein, 1676 aa, synthetic construct; identical to SEQ ID NO: 132
  CARBOHYD 741: note = N is linked to the N-linked glycan structure Hex(5)HexNAc(4)Fuc(0)NeuAc(1)

SEQ ID NO: 209 - protein, 367 aa, synthetic construct; identical to SEQ ID NO: 38
  CARBOHYD 176: note = N is linked to the glycan structure Hex(6)HexNAc(5)Fuc(1)NeuAc(3)
  CARBOHYD 176: note = N is linked to the glycan structure Hex(6)HexNAc(5)Fuc(0)NeuAc(2)
  CARBOHYD 176: note = N is linked to the glycan structure Hex(6)HexNAc(5)Fuc(0)NeuAc(1)
  CARBOHYD 176: note = N is linked to the N-linked glycan structure Hex(5)HexNAc(4)Fuc(0)NeuAc(2)

SEQ ID NO: 210 - protein, 462 aa, synthetic construct; identical to SEQ ID NO: 39

SEQ ID NO: 211 - protein, 406 aa, synthetic construct; identical to SEQ ID NO: 135

SEQ ID NO: 212 - protein, 525 aa, synthetic construct; identical to SEQ ID NO: 31
  CARBOHYD 125: note = N is linked to the N-linked glycan structure Hex(5)HexNAc(4)Fuc(0)NeuAc(2)
  CARBOHYD 271: note = S is linked to the O-linked glycan structure Hex(1)HexNAc(1)Fuc(0)NeuAc(2)
  CARBOHYD 271: note = S is linked to the O-linked glycan structure Hex(2)HexNAc(2)Fuc(0)NeuAc(1)

SEQ ID NO: 213 - protein, 500 aa, synthetic construct; identical to SEQ ID NO: 137

SEQ ID NO: 214 - protein, 353 aa, synthetic construct; identical to SEQ ID NO: 155

SEQ ID NO: 215 - protein, 330 aa, synthetic construct [sequence omitted]

SEQ ID NO: 216 - protein, 326 aa, synthetic construct; identical to SEQ ID NO: 157
  CARBOHYD 176: note = N is linked to the glycan structure Hex(3)HexNAc(3)Fuc(1)NeuAc(0)
  CARBOHYD 175: note = N is linked to the N-linked glycan structure Hex(3)HexNAc(5)Fuc(0)NeuAc(0)
  CARBOHYD 175: note = N is linked to the glycan structure Hex(4)HexNAc(4)Fuc(1)NeuAc(0)
  CARBOHYD 175: note = N is linked to the N-linked glycan structure Hex(5)HexNAc(4)Fuc(1)NeuAc(0)

SEQ ID NO: 217 - protein, 377 aa, synthetic construct
ASTKGPSVFPLAPCSRSTSGGTAALGCLVKDYFPEPVTVSWNSGALTSGVHTFPAVLQSSGLYSLSSVVTVPSSSLGTQTYTCNVNHKPSNTKVDKRVELKTPLGDTTHTCPRCPEPKSCDTPPPCPRCPEPKSCDTPPPCPRCPEPKSCDTPPPCPRCPAPELLGGPSVFLFPPKPKDTLMISRTPEVTCVVVDVSHEDPEVQFKWYVDGVEVHNAKTKPREEQYNSTFRVVSVLTVLHQDWLNGKEYKCKVSNKALPAPIEKTISKTKGQPREPQVYTLPPSREEMTKNQVSLTCLVKGFYPSDIAVEWESSGQPENNYNTTPPMLDSDGSFFLYSKLTVDKSRWQQGNIFSCSVMHEALHNRFTQKSLSLSPGK

SEQ ID NO: 218 - protein, 946 aa, synthetic construct
MKRLTCFFICFFLSEVSGFEIPINGLSEFVDYEDLVELAPGKFQLVAENRRYQRSLPGESEEMMEEVDQVTLYSYKVQSTITSRMATTMIQSKVVNNSPQPQNVVFDVQIPKGAFISNFSMTVDGKTFRSSIKEKTVGRALYAQARAKGKTAGLVRSSALDMENFRTEVNVLPGAKVQFELHYQEVKWRKLGSYEHRIYLQPGRLAKHLEVDVWVIEPQGLRFLHVPDTFEGHFDGVPVISKGQQKAHVSFKPTVAQQRICPNCRETAVDGELVVLYDVKREEKAGELEVFNGYFVHFFAPDNLDPIPKNILFVIDVSGSMWGVKMKQTVEAMKTILDDLRAEDHFSVIDFNQNIRTWRNDLISATKTQVADAKRYIEKIQPSGGTNINEALLRAIFILNEANNLGLLDPNSVSLIILVSDGDPTVGELKLSKIQKNVKENIQDNISLFSLGMGFDVDYDFLKRLSNENHGIAQRIYGNQDTSSQLKKFYNQVSTPLLRNVQFNYPHTSVTDVTQNNFHNYFGGSEIVVAGKFDPAKLDQIESVITATSANTQLVLETLAQMDDLQDFLSKDKHADPDFTRKLWAYLTINQLLAERSLAPTAAAKRRITRSILQMSLDHHIVTPLTSLVIENEAGDERMLADAPPQDPSCCSGALYYGSKVVPDSTPSWANPSPTPVISMLAQGSQVLESTPPPHVMRVENDPHFIIYLPKSQKNICFNIDSEPGKILNLVSDPESGIVVNGQLVGAKKPNNGKLSTYFGKLGFYFQSEDIKIEISTETITLSHGSSTFSLSWSDTAQVTNQRVQISVKKEKVVTITLDKEMSFSVLLHRVWKKHPVNVDFLGIYIPPTNKFSPKAHGLIGQFMQEPKIHIFNERPGKDPEKPEASMEVKGQKLIITRGLQKDYRTDLVFGTDVTCWFVHNSGKGFIDGHYKDYFVPQLYSFLKRP

SEQ ID NO: 219 - protein, 638 aa, synthetic construct; identical to SEQ ID NO: 36
  CARBOHYD 494: note = N is linked to the N-linked glycan structure Hex(5)HexNAc(4)Fuc(1)NeuAc(0)
  CARBOHYD 127: note = N is linked to the N-linked glycan structure Hex(5)HexNAc(4)Fuc(0)NeuAc(2)
  CARBOHYD 494: note = N is linked to the N-linked glycan structure Hex(6)HexNAc(5)Fuc(0)NeuAc(3)

SEQ ID NO: 220 - protein, 381 aa, synthetic construct
MWRSLGLALALCLLPSGGTESQDQSSLCKQPPAWSIRDQDPMLNSNGSVTVVALLQASUYLCILQASKLEDLRVKLKKEGYSNISYIVVNHQGISSRLKYTHLKNKVSEHIPVYQQEENQTDVWTLLNGSKDDFLIYDRCGRLVYHLGLPFSFLTFPYVEEAIKIAYCEKKCGNCSLTTLKDEDFCKRVSLATVDKTVETPSPHYHHEHHHNHGHQHLGSSELSENQQPGAPNAPTHPAPPGLHHHHKHKGQHRQGHPENRDMPASEDLQDLQKKLCRKRCINQLLCKLPTDSELAPRSUCCHCRHLIFEKTGSAITUQCKENLPSLCSUQGLRAEENITESCQURLPPAAUQISQQLIPTEASASURUKNQAKKUEUPSN

SEQ ID NO: 221 - protein, 698 aa, synthetic construct; identical to SEQ ID NO: 159

SEQ ID NO: 222 - protein, 298 aa, synthetic construct; identical to SEQ ID NO: 156

SEQ ID NO: 223 - protein, 340 aa, synthetic construct; identical to SEQ ID NO: 160

SEQ ID NO: 224 - protein, 13 aa, synthetic construct
  CARBOHYD 8: note = N is linked to the N-linked glycan structure Hex(5)HexNAc(4)Fuc(0)NeuAc(2)
LPPGLLANFTLLR

SEQ ID NO: 225 - protein, 19 aa, synthetic construct
  CARBOHYD 3: note = N is linked to the glycan structure Hex(6)HexNAc(5)Fuc(1)NeuAc(1)
VSNQTLSLFFTVLQDVPVR

SEQ ID NO: 226 - protein, 19 aa, synthetic construct
VSNQTLSLFFTVLQDVPVR

SEQ ID NO: 227 - protein, 32 aa, synthetic construct; identical to SEQ ID NO: 84
  CARBOHYD 6: note = N is linked to the N-linked glycan structure Hex(5)HexNAc(4)Fuc(0)NeuAc(2)

SEQ ID NO: 228 - protein, 20 aa, synthetic construct
  CARBOHYD 3: note = N is linked to the N-linked glycan structure Hex(6)HexNAc(5)Fuc(0)NeuAc(3)
TLNQSSDELQLSMGNAMFVK

SEQ ID NO: 229 - protein, 16 aa, synthetic construct
  CARBOHYD 4: note = N is linked to the glycan structure Hex(6)HexNAc(5)Fuc(1)NeuAc(3)
YTGNASALFILPDQDK

SEQ ID NO: 230 - protein, 15 aa, synthetic construct
  CARBOHYD 7: note = N is linked to the glycan structure Hex(5)HexNAc(3)Fuc(0)NeuAc(1)
FVEGSHNSTVSLTTK

SEQ ID NO: 231 - protein, 32 aa, synthetic construct; identical to SEQ ID NO: 51

SEQ ID NO: 232 - protein, 10 aa, synthetic construct
  CARBOHYD 1: note = N is linked to the N-linked glycan structure Hex(5)HexNAc(4)Fuc(0)NeuAc(2)
NGTAVCATNR

SEQ ID NO: 233 - protein, 6 aa, synthetic construct
  CARBOHYD 2: note = N is linked to the N-linked glycan structure Hex(5)HexNAc(4)Fuc(0)NeuAc(1)
ANISHK

SEQ ID NO: 234 - protein, 22 aa, synthetic construct
  CARBOHYD 11: note = N is linked to the glycan structure Hex(6)HexNAc(5)Fuc(1)NeuAc(3)
  CARBOHYD 11: note = N is linked to the glycan structure Hex(6)HexNAc(5)Fuc(0)NeuAc(2)
  CARBOHYD 11: note = N is linked to the glycan structure Hex(6)HexNAc(5)Fuc(0)NeuAc(1)
  CARBOHYD 11: note = N is linked to the N-linked glycan structure Hex(5)HexNAc(4)Fuc(0)NeuAc(2)
AALAAFNAQNNGSNFQLEEISR

SEQ ID NO: 235 - protein, 21 aa, synthetic construct
TVVQPSVGAAAGPVVPPCPGR

SEQ ID NO: 236 - protein, 13 aa, synthetic construct
  CARBOHYD 7: note = N is linked to the glycan structure Hex(6)HexNAc(5)Fuc(1)NeuAc(3)
SWPAVGNCSSALR

SEQ ID NO: 237 - protein, 16 aa, synthetic construct
  CARBOHYD 7: note = N is linked to the N-linked glycan structure Hex(5)HexNAc(4)Fuc(0)NeuAc(2)
ALPQPQNVTSLLGCTH

SEQ ID NO: 238 - protein, 24 aa, synthetic construct
  CARBOHYD 6: note = N is linked to the N-linked glycan structure Hex(5)HexNAc(4)Fuc(0)NeuAc(2)
  CARBOHYD 6: note = N is linked to the glycan structure Hex(6)HexNAc(5)Fuc(0)NeuAc(1)
MVSHHNLTTGATLINEQWLLTTAK

SEQ ID NO: 239 - protein, 24 aa, synthetic construct
  CARBOHYD 6: note = N is linked to the N-linked glycan structure Hex(5)HexNAc(4)Fuc(0)NeuAc(2)
  CARBOHYD 6: note = N is linked to the glycan structure Hex(6)HexNAc(5)Fuc(0)NeuAc(2)
MVSHHNLTTGATLINEQWLLTTAK

SEQ ID NO: 240 - protein, 16 aa, synthetic construct
  CARBOHYD 6: note = N is linked to the glycan structure Hex(6)HexNAc(5)Fuc(1)NeuAc(1)
  CARBOHYD 6: note = N is linked to the glycan structure Hex(6)HexNAc(5)Fuc(1)NeuAc(2)
VVLHPNYSQVDIGLIK

SEQ ID NO: 241 - protein, 8 aa, synthetic construct
  CARBOHYD 6: note = A is linked to the N-linked glycan structure Hex(5)HexNAc(4)Fuc(1)NeuAc(2)
  CARBOHYD 5: note = N is linked to the N-linked glycan structure Hex(5)HexNAc(4)Fuc(0)NeuAc(2)
DTFVNASR

SEQ ID NO: 242 - protein, 19 aa, synthetic construct
  CARBOHYD 4: note = N is linked to the glycan structure Hex(6)HexNAc(5)Fuc(1)NeuAc(3)
VLSNNSDANLELINTWVAK

SEQ ID NO: 243 - protein, 22 aa, synthetic construct
  CARBOHYD 13: note = N is linked to the N-linked glycan structure Hex(3)HexNAc(5)Fuc(0)NeuAc(0)
PALEDLLLGSEANLTCTLTGLR

SEQ ID NO: 244 - protein, 9 aa, synthetic construct
  CARBOHYD 5: note = N is linked to the glycan structure Hex(3)HexNAc(5)Fuc(1)NeuAc(0)
EEQYNSTYR

SEQ ID NO: 245 - protein, 9 aa, synthetic construct
  CARBOHYD 5: note = N is linked to the N-linked glycan structure Hex(4)HexNAc(5)Fuc(0)NeuAc(0)
EEQYNSTYR

SEQ ID NO: 246 - protein, 9 aa, synthetic construct
  CARBOHYD 5: note = N is linked to the N-linked glycan structure Hex(5)HexNAc(4)Fuc(0)NeuAc(1)
EEQYNSTYR

SEQ ID NO: 247 - protein, 9 aa, synthetic construct
  CARBOHYD 5: note = N is linked to the N-linked glycan structure Hex(3)HexNAc(5)Fuc(0)NeuAc(0)
  CARBOHYD 5: note = N is linked to the glycan structure Hex(3)HexNAc(3)Fuc(1)NeuAc(0)
EEQFNSTFR

SEQ ID NO: 248 - protein, 9 aa, synthetic construct
  CARBOHYD 5: note = N is linked to the glycan structure Hex(4)HexNAc(4)Fuc(1)NeuAc(0)
  CARBOHYD 5: note = N is linked to the glycan structure Hex(3)HexNAc(3)Fuc(1)NeuAc(0)
EEQFNSTFR

SEQ ID NO: 249 - protein, 9 aa, synthetic construct
  CARBOHYD 5: note = N is linked to the N-linked glycan structure Hex(5)HexNAc(4)Fuc(1)NeuAc(0)
  CARBOHYD 5: note = N is linked to the glycan structure Hex(3)HexNAc(3)Fuc(1)NeuAc(0)
EEQFNSTFR

SEQ ID NO: 250 - protein, 13 aa, synthetic construct
IYSGILNLSDITK

SEQ ID NO: 251 - protein, 19 aa, synthetic construct
  CARBOHYD 6: note = N is linked to the N-linked glycan structure Hex(5)HexNAc(4)Fuc(1)NeuAc(0)
LQAPLNYTEFQKPICLPSK

SEQ ID NO: 252 - protein, 21 aa, synthetic construct
TPEVTCVVVDVSHEDPEVQFK

SEQ ID NO: 253 - protein, 7 aa, synthetic construct
AFLLTPR

SEQ ID NO: 254 - protein, 10 aa, synthetic construct
VNHVTLSQPK

SEQ ID NO: 255 - protein, 8 aa, synthetic construct
VSLATVDK

SEQ ID NO: 256 - protein, 21 aa, synthetic construct
  CARBOHYD 9: note = N is linked to the N-linked glycan structure Hex(5)HexNAc(4)Fuc(0)NeuAc(2)
QQQHLFGSNVTDCSGNFCLFR

SEQ ID NO: 257 - protein, 9 aa, synthetic construct
  CARBOHYD 8: note = N is linked to the N-linked glycan structure Hex(5)HexNAc(4)Fuc(0)NeuAc(2)
FGCEIENNR

SEQ ID NO: 258 - protein, 19 aa, synthetic construct
  CARBOHYD 3: note = N is linked to the N-linked glycan structure Hex(5)HexNAc(4)Fuc(1)NeuAc(1)
VSNQTLSLFFTVLQDVPVR

SEQ ID NO: 259 - protein, 19 aa, synthetic construct
  CARBOHYD 3: note = N is linked to the N-linked glycan structure Hex(5)HexNAc(4)Fuc(1)NeuAc(2)
VSNQTLSLFFTVLQDVPVR

SEQ ID NO: 260 - protein, 33 aa, synthetic construct; identical to SEQ ID NO: 81
  CARBOHYD 10: note = N is linked to the glycan structure Hex(5)HexNAc(2)Fuc(0)NeuAc(0)

SEQ ID NO: 261 - protein, 33 aa, synthetic construct; identical to SEQ ID NO: 81
  CARBOHYD 10: note = N is linked to the N-linked glycan structure Hex(5)HexNAc(4)Fuc(0)NeuAc(1)

SEQ ID NO: 262 - protein, 21 aa, synthetic construct
  CARBOHYD 10: note = N is linked to the N-linked glycan structure Hex(5)HexNAc(4)Fuc(0)NeuAc(1)
IITILEEEMNVSVCGLYTYGK

SEQ ID NO: 263 - protein, 32 aa, synthetic construct; identical to SEQ ID NO: 84
  CARBOHYD 6: note = N is linked to the N-linked glycan structure Hex(5)HexNAc(4)Fuc(0)NeuAc(1)

SEQ ID NO: 264 - protein, 16 aa, synthetic construct
  CARBOHYD 15: note = N is linked to the N-linked glycan structure Hex(6)HexNAc(5)Fuc(0)NeuAc(3)
SVQEIQATFFYFTPNK

SEQ ID NO: 265 - protein, 16 aa, synthetic construct
  CARBOHYD 15: note = N is linked to the glycan structure Hex(7)HexNAc(6)Fuc(0)NeuAc(3)
SVQEIQATFFYFTPNK

SEQ ID NO: 266 - protein, 16 aa, synthetic construct
  CARBOHYD 15: note = N is linked to the N-linked glycan structure Hex(7)HexNAc(6)Fuc(0)NeuAc(4)
SVQEIQATFFYFTPNK

SEQ ID NO: 267 - protein, 24 aa, synthetic construct
  CARBOHYD 15: note = N is linked to the N-linked glycan structure Hex(6)HexNAc(5)Fuc(0)NeuAc(3
SVQEIQATFFYFTPNKTEDTIFLR

SEQ ID NO: 268 - protein, 24 aa, synthetic construct
  CARBOHYD 15: note = N is linked to the glycan structure Hex(7)HexNAc(6)Fuc(0)NeuAc(3)
SVQEIQATFFYFTPNKTEDTIFLR

SEQ ID NO: 269 - protein, 7 aa, synthetic construct
  CARBOHYD 2: note = N is linked to the glycan structure Hex(6)HexNAc(5)Fuc(1)NeuAc(3)
ENGTVSR

SEQ ID NO: 270 - protein, 7 aa, synthetic construct
  CARBOHYD 2: note = N is linked to the glycan structure Hex(7)HexNAc(6)Fuc(1)NeuAc(4)
ENGTVSR

SEQ ID NO: 271 - protein, 33 aa, synthetic construct; identical to SEQ ID NO: 14
  CARBOHYD 16: note = N is linked to the N-linked glycan structure Hex(5)HexNAc(4)Fuc(0)NeuAc(2)

SEQ ID NO: 272 - protein, 16 aa, synthetic construct
  CARBOHYD 10: note = N is linked to the glycan structure Hex(6)HexNAc(5)Fuc(1)NeuAc(3)
EHEGAIYPDNTTDFQR

SEQ ID NO: 273 - protein, 17 aa, synthetic construct
  CARBOHYD 9: note = N is linked to the glycan structure Hex(6)HexNAc(5)Fuc(1)NeuAc(3)
ELHHLQEQNVSNAFLDK

SEQ ID NO: 274 - protein, 22 aa, synthetic construct
  CARBOHYD 11: note = N is linked to the glycan structure Hex(6)HexNAc(5)Fuc(1)NeuAc(3)
  CARBOHYD 11: note = N is linked to the glycan structure Hex(6)HexNAc(5)Fuc(0)NeuAc(2)
  CARBOHYD 11: note = N is linked to the glycan structure Hex(6)HexNAc(5)Fuc(0)NeuAc(1)
  CARBOHYD 11: note = N is linked to the N-linked glycan structure Hex(5)HexNAc(4)Fuc(0)NeuAc(2)
AALAAFNAQNNGSNFQLEEISR

SEQ ID NO: 275 - protein, 22 aa, synthetic construct
  CARBOHYD 11: note = N is linked to the glycan structure Hex(6)HexNAc(5)Fuc(1)NeuAc(3)
  CARBOHYD 11: note = N is linked to the glycan structure Hex(6)HexNAc(5)Fuc(0)NeuAc(2)
  CARBOHYD 11: note = N is linked to the glycan structure Hex(6)HexNAc(5)Fuc(0)NeuAc(1)
  CARBOHYD 11: note = N is linked to the N-linked glycan structure Hex(5)HexNAc(4)Fuc(0)NeuAc(2)
AALAAFNAQNNGSNFQLEEISR

SEQ ID NO: 276 - protein, 13 aa, synthetic construct
  CARBOHYD 5: note = N is linked to the glycan structure Hex(6)HexNAc(5)Fuc(1)NeuAc(3)
  CARBOHYD 9: note = N is linked to the glycan structure Hex(6)HexNAc(5)Fuc(0)NeuAc(2)
NLFLNHSENATAK

SEQ ID NO: 277 - protein, 13 aa, synthetic construct
  CARBOHYD 5: note = N is linked to the N-linked glycan structure Hex(5)HexNAc(4)Fuc(0)NeuAc(1)
NLFLNHSENATAK

SEQ ID NO: 278 - protein, 16 aa, synthetic construct
  CARBOHYD 6: note = N is linked to the glycan structure Hex(6)HexNAc(5)Fuc(1)NeuAc(1)
  CARBOHYD 6: note = N is linked to the glycan structure Hex(6)HexNAc(5)Fuc(0)NeuAc(0)
VVLHPNYSQVDIGLIK

SEQ ID NO: 279 - protein, 16 aa, synthetic construct
  CARBOHYD 6: note = N is linked to the glycan structure Hex(6)HexNAc(5)Fuc(1)NeuAc(1)
VVLHPNYSQVDIGLIK

SEQ ID NO: 280 - protein, 19 aa, synthetic construct
  CARBOHYD 5: note = N is linked to the N-linked glycan structure Hex(5)HexNAc(4)Fuc(0)NeuAc(2)
VIDFNCTTSSVSSALANTK

SEQ ID NO: 281 - protein, 14 aa, synthetic construct
  CARBOHYD 1: note = S is linked to the O-linked glycan structure Hex(1)HexNAc(1)Fuc(0)NeuAc(2)
SSTTKPPFKPHGSR

SEQ ID NO: 282 - protein, 14 aa, synthetic construct
  CARBOHYD 1: note = S is linked to the O-linked glycan structure Hex(2)HexNAc(2)Fuc(0)NeuAc(1)
SSTTKPPFKPHGSR

SEQ ID NO: 283 - protein, 27 aa, synthetic construct
  CARBOHYD 18: note = N is linked to the N-linked glycan structure Hex(5)HexNAc(4)Fuc(0)NeuAc(0)
LSLHRPALEDLLLGSEANLTCTLTGLR

SEQ ID NO: 284 - protein, 27 aa, synthetic construct
  CARBOHYD 18: note = N is linked to the N-linked glycan structure Hex(5)HexNAc(4)Fuc(0)NeuAc(1)
LSLHRPALEDLLLGSEANLTCTLTGLR

SEQ ID NO: 285 - protein, 22 aa, synthetic construct
  CARBOHYD 13: note = N is linked to the glycan structure Hex(4)HexNAc(5)Fuc(0)NeuAc(1)
PALEDLLLGSEANLTCTLTGLR

SEQ ID NO: 286 - protein, 22 aa, synthetic construct
  CARBOHYD 13: note = N is linked to the N-linked glycan structure Hex(5)HexNAc(4)Fuc(0)NeuAc(1)
PALEDLLLGSEANLTCTLTGLR

SEQ ID NO: 287 - protein, 9 aa, synthetic construct
  CARBOHYD 5: note = N is linked to the glycan structureHex(3)HexNAc(4)Fuc(1)NeuAc(0)
EEQYNSTYR

SEQ ID NO: 288 - protein, 9 aa, synthetic construct
  CARBOHYD 5: note = N is linked to the glycan structure Hex(4)HexNAc(3)Fuc(1)NeuAc(0)
EEQYNSTYR

SEQ ID NO: 289 - protein, 9 aa, synthetic construct
  CARBOHYD 5: note = N is linked to the glycan structure Hex(4)HexNAc(4)Fuc(1)NeuAc(0)
EEQYNSTYR

SEQ ID NO: 290 - protein, 9 aa, synthetic construct
  CARBOHYD 9: note = N is linked to the glycan structure Hex(3)HexNAc(3)Fuc(1)NeuAc(0)
EEQFNSTFR

SEQ ID NO: 291 - protein, 14 aa, synthetic construct
GAFISNFSMTVDGK

SEQ ID NO: 292 - protein, 8 aa, synthetic construct
  CARBOHYD 5: note = N is linked to the N-linked glycan structure Hex(5)HexNAc(4)Fuc(0)NeuAc(2)
GVNFNVSK

SEQ ID NO: 293 - protein, 19 aa, synthetic construct
  CARBOHYD 6: note = N is linked to the N-linked glycan structure Hex(6)HexNAc(5)Fuc(0)NeuAc(3)
LQAPLNYTEFQKPICLPSK

SEQ ID NO: 294 - protein, 21 aa, synthetic construct
  CARBOHYD 9: note = N is linked to the N-linked glycan structure Hex(5)HexNAc(4)Fuc(0)NeuAc(0)
QQQHLFGSNVTDCSGNFCLFR

SEQ ID NO: 295 - protein, 21 aa, synthetic construct
  CARBOHYD 9: note = N is linked to the N-linked glycan structure Hex(5)HexNAc(4)Fuc(0)NeuAc(2)
QQQHLFGSNVTDCSGNFCLFR

SEQ ID NO: 296 - protein, 21 aa, synthetic construct
  CARBOHYD 9: note = N is linked to the glycan structure Hex(6)HexNAc(5)Fuc(1)NeuAc(3)
QQQHLFGSNVTDCSGNFCLFR

SEQ ID NO: 297 - protein, 298 aa, synthetic construct; identical to SEQ ID NO: 156
  CARBOHYD 128: note = N is linked to the N-linked glycan structure Hex(5)HexNAc(4)Fuc(0)NeuAc(2)

SEQ ID NO: 298 - protein, 500 aa, synthetic construct; identical to SEQ ID NO: 137
  CARBOHYD 253: note = N is linked to the N-linked glycan structure Hex(6)HexNAc(5)Fuc(0)NeuAc(3)
  CARBOHYD 238: note = N is linked to the N-linked glycan structure Hex(5)HexNAc(4)Fuc(1)NeuAc(2)
  CARBOHYD 238: note = N is linked to the N-linked glycan structure Hex(5)HexNAc(4)Fuc(0)NeuAc(2)
  CARBOHYD 253: note = N is linked to the glycan structure Hex(6)HexNAc(5)Fuc(1)NeuAc(3)

SEQ ID NO: 299 - protein, 583 aa, synthetic construct; identical to SEQ ID NO: 207
  CARBOHYD 494: note = N is linked to the N-linked glycan structure Hex(5)HexNAc(4)Fuc(0)NeuAc(2)
  CARBOHYD 70: note = N is linked to the N-linked glycan structure Hex(5)HexNAc(4)Fuc(0)NeuAc(2)

SEQ ID NO: 300 - protein, 1065 aa, synthetic construct; identical to SEQ ID NO: 131
  CARBOHYD 138: note = N is linked to the glycan structure Hex(6)HexNAc(5)Fuc(1)NeuAc(3)
  CARBOHYD 397: note = N is linked to the N-linked glycan structure Hex(5)HexNAc(4)Fuc(0)NeuAc(2)
  CARBOHYD 138: note = N is linked to the N-linked glycan structure Hex(5)HexNAc(4)Fuc(0)NeuAc(2)
  CARBOHYD 138: note = N is linked to the glycan structure Hex(6)HexNAc(5)Fuc(0)NeuAc(2)
  CARBOHYD 397: note = N is linked to the glycan structure Hex(6)HexNAc(5)Fuc(1)NeuAc(3)
  CARBOHYD 762: note = N is linked to the glycan structure Hex(6)HexNAc(5)Fuc(1)NeuAc(3)
  CARBOHYD 762: note = N is linked to the N-linked glycan structure Hex(6)HexNAc(5)Fuc(0)NeuAc(3)

SEQ ID NO: 301 - protein, 330 aa, synthetic construct [sequence omitted]

SEQ ID NO: 302 - protein, 462 aa, synthetic construct; identical to SEQ ID NO: 39
  CARBOHYD 64: note = N is linked to the N-linked glycan structure Hex(5)HexNAc(4)Fuc(0)NeuAc(2)
  CARBOHYD 453: note = N is linked to the N-linked glycan structure Hex(5)HexNAc(4)Fuc(0)NeuAc(2)
  CARBOHYD 187: note = N is linked to the N-linked glycan structure Hex(6)HexNAc(5)Fuc(0)NeuAc(3)
  CARBOHYD 187: note = N is linked to the glycan structure Hex(6)HexNAc(5)Fuc(1)NeuAc(3)

SEQ ID NO: 303 - protein, 4563 aa, synthetic construct; identical to SEQ ID NO: 29
  CARBOHYD 983: note = N is linked to the N-linked glycan structure Hex(5)HexNAc(4)Fuc(0)NeuAc(2)
  CARBOHYD 3411: note = N is linked to the glycan structure Hex(5)HexNAc(3)Fuc(0)NeuAc(1)
  CARBOHYD 3895: note = N is linked to the N-linked glycan structure Hex(5)HexNAc(4)Fuc(0)NeuAc(1)

SEQ ID NO: 304 - protein, 406 aa, synthetic construct; identical to SEQ ID NO: 135
  CARBOHYD 207: note = N is linked to the glycan structure Hex(12)HexNAc(10)Fuc(0)NeuAc(5)
  CARBOHYD 184: note = N is linked to the N-linked glycan structure Hex(5)HexNAc(4)Fuc(0)NeuAc(2)
  CARBOHYD 241: note = N is linked to the N-linked glycan structure Hex(5)HexNAc(4)Fuc(0)NeuAc(2)
  CARBOHYD 184: note = N is linked to the glycan structure Hex(6)HexNAc(5)Fuc(1)NeuAc(3)
  CARBOHYD 207: note = N is linked to the N-linked glycan structure Hex(5)HexNAc(4)Fuc(0)NeuAc(2) or Hex(6)HexNAc(5)Fuc(0)NeuAc(2)
  CARBOHYD 207: note = N is linked to the N-linked glycan structure Hex(5)HexNAc(4)Fuc(0)NeuAc(2)
  CARBOHYD 211: note = N is linked to the glycan structure Hex(6)HexNAc(5)Fuc(1)NeuAc(3)
  CARBOHYD 207: note = N is linked to the glycan structure Hex(6)HexNAc(5)Fuc(0)NeuAc(2) or Hex(6)HexNAc(5)Fuc(0)NeuAc(3)
  CARBOHYD 241: note = N is linked to the glycan structure  Hex(6)HexNAc(5)F uc(1)NeuAc(3)
  CARBOHYD 241: note = N is linked to the glycan structure Hex(7)HexNAc(6)Fuc(1)Neu(5)Ac(3)
  CARBOHYD 184: note = N is linked to the glycan structure Hex(6)HexNAc(5)Fuc(1)NeuAc(3)
  CARBOHYD 211: note = N is linked to the glycan structure Hex(6)HexNAc(5)Fuc(0)NeuAc(2)
  CARBOHYD 207: note = N is linked to the glycan structure Hex(6)HexNAc(5)Fuc(0)NeuAc(2)
  CARBOHYD 211: note = N is linked to the N-linked glycan structure Hex(6)HexNAc(5)Fuc(0)NeuAc(3)
  CARBOHYD 241: note = N is linked to the glycan structure Hex(6)HexNAc(5)Fuc(1)NeuAc(1)
  CARBOHYD 241: note = N is linked to the glycan structure Hex(6)HexNAc(5)Fuc(1)NeuAc(2)
  CARBOHYD 241: note = N is linked to the glycan structure Hex(7)HexNAc(6)Fuc(1)Neu(5)Ac(3)
  CARBOHYD 186: note = N is linked to the N-linked glycan structure Hex(6)HexNAc(5)Fuc(0)NeuAc(3)
  CARBOHYD 207: note = N is linked to the N-linked glycan structure Hex(5)HexNAc(4)Fuc(0)NeuAc(2) or Hex(6)HexNAc(5)Fuc(0)NeuAc(3)
  CARBOHYD 241: note = N is linked to the N-linked glycan structure Hex(6)HexNAc(5)Fuc(0)NeuAc(3)
  CARBOHYD 184: note = N is linked to the glycan structure Hex(6)HexNAc(5)Fuc(0)NeuAc(1)
  CARBOHYD 184: note = N is linked to the glycan structure Hex(6)HexNAc(5)Fuc(0)NeuAc(2)
  CARBOHYD 207: note = N is linked to the glycan structure Hex(6)HexNAc(5)Fuc(1)NeuAc(3)
  CARBOHYD 207: note = N is linked to the glycan structure Hex(5)HexNAc(4)Fuc(0)NeuAc(1)
  CARBOHYD 241: note = N is linked to the glycan structure Hex(6)HexNAc(5)Fuc(0)NeuAc(0)

SEQ ID NO: 305 - protein, 377 aa, synthetic construct; identical to SEQ ID NO: 217
  CARBOHYD 227: note = N is linked to the glycan structure Hex(3)HexNAc(4)Fuc(0)NeuAc(0)

SEQ ID NO: 306 - protein, 377 aa, synthetic construct; identical to SEQ ID NO: 217
  CARBOHYD 227: note = N is linked to the glycan structure Hex(3)HexNAc(4)Fuc(0)NeuAc(0)

SEQ ID NO: 307 - protein, 9 aa, synthetic construct
  CARBOHYD 8: note = N is linked to the N-linked glycan structure Hex(5)HexNAc(4)Fuc(0)NeuAc(2)
FGCEIENNR

SEQ ID NO: 308 - protein, 19 aa, synthetic construct
  CARBOHYD 4: note = N is linked to the N-linked glycan structure Hex(6)HexNAc(5)Fuc(0)NeuAc(3)
VLSNNSDANLELINTWVAK

SEQ ID NO: 309 - protein, 7 aa, synthetic construct
  CARBOHYD 4: note = N is linked to the N-linked glycan structure Hex(5)HexNAc(4)Fuc(0)NeuAc(2)
LISNCSK

SEQ ID NO: 310 - protein, 16 aa, synthetic construct
  CARBOHYD 10: note = N is linked to the glycan structure Hex(6)HexNAc(5)Fuc(1)NeuAc(3)
  CARBOHYD 10: note = N is linked to the N-linked glycan structure Hex(5)HexNAc(4)Fuc(0)NeuAc(2)
  CARBOHYD 10: note = N is linked to the glycan structure Hex(6)HexNAc(5)Fuc(0)NeuAc(2)
EHEGAIYPDNTTDFQR

SEQ ID NO: 311 - protein, 9 aa, synthetic construct
  CARBOHYD 5: note = N is linked to the glycan structure Hex(3)HexNAc(4)Fuc(1)NeuAc(0)
  CARBOHYD 5: note = N is linked to the glycan structure Hex(4)HexNAc(3)Fuc(0)NeuAc(0)
EEQYNSTYR

SEQ ID NO: 312 - protein, 22 aa, synthetic construct
  CARBOHYD 15: note = N is linked to the N-linked glycan structure Hex(5)HexNAc(4)Fuc(0)NeuAc(2)
CSDGWSFDATTLDDNGTMLFFK

SEQ ID NO: 313 - protein, 33 aa, synthetic construct; identical to SEQ ID NO: 14
  CARBOHYD 16: note = N is linked to the N-linked glycan structure Hex(5)HexNAc(4)Fuc(0)NeuAc(2)

SEQ ID NO: 314 - protein, 13 aa, synthetic construct
  CARBOHYD 5: note = N is linked to the glycan structure Hex(12)HexNAc(10)Fuc(0)NeuAc(5)
  CARBOHYD 9: note = N is linked to the glycan structure Hex(12)HexNAc(10)Fuc(0)NeuAc(5)
  CARBOHYD 5: note = N is linked to the N-linked glycan structure Hex(5)HexNAc(4)Fuc(0)NeuAc(2)
  CARBOHYD 9: note = N is linked to the glycan structure Hex(6)HexNAc(5)Fuc(0)NeuAc(2)
  CARBOHYD 9: note = N is linked to the glycan structure Hex(6)HexNAc(5)Fuc(1)NeuAc(3)
  CARBOHYD 5: note = N is linked to the glycan structure Hex(6)HexNAc(5)Fuc(0)NeuAc(2)
  CARBOHYD 9: note = N is linked to the glycan structure Hex(6)HexNAc(5)Fuc(0)NeuAc(3)
NLFLNHSENATAK

SEQ ID NO: 315 - protein, 9 aa, synthetic construct
  CARBOHYD 5: note = N is linked to the glycan structure Hex(3)HexNAc(4)Fuc(0)NeuAc(0)
EEQYNSTFR

SEQ ID NO: 316 - protein, 9 aa, synthetic construct
  CARBOHYD 5: note = N is linked to the glycan structure Hex(3)HexNAc(4)Fuc(0)NeuAc(0)
EEQYNSTFR

SEQ ID NO: 317-416 - skipped (100 entries)

SEQ ID NO: 417 - protein, 752 aa, synthetic construct
  CARBOHYD 621: note = N is linked to the glycan structure Hex(5)HexNAc(2)Fuc(0)NeuAc(0)
MGPLMVLFCLLFLYPGLADSAPSCPQNVNISGGTFTLSHGWAPGSLLTYSCPQGLYPSPASRLCKSSGQWQTPGATRSLSKAVCKPVRCPAPVSFENGIYTPRLGSYPVGGNVSFECEDGFILRGSPVRQCRPNGMWDGETAVCDNGAGHCPNPGISLGAVRTGFRFGHGDKVRYRCSSNLVLTGSSERECQGNGVWSGTEPICRQPYSYDFPEDVAPALGTSFSHMLGATNPTQKTKESLGRKIQIQRSGHLNLYLLLDCSQSVSENDFLIFKESASLMVDRIFSFEINVSVAIITFASEPKVLMSVLNDNSRDMTEVISSLENANYKDHENGTGTNTYAALNSVYLMMNNQMRLLGMETMAWQEIRHAIILLTDGKSNMGGSPKTAVDHIREILNINQKRNDYLDIYAIGVGKLDVDWRELNELGSKKDGERHAFILQDTKALHQVFEHMLDVSKLTDTICGVGNMSANASDQERTPWHVTIKPKSQETCRGALISDQWVLTAAHCFRDGNDHSLWRVNVGDPKSQWGKEFLIEKAVISPGFDVFAKKNQGILEFYGDDIALLKLAQKVKMSTHARPICLPCTMEANLALRRPQGSTCRDHENELLNKQSVPAHFVALNGSKLNINLKMGVEWTSCAEVVSQEKTMFPNLTDVREVVTDQFLCSGTQEDESPCKGESGGAVFLERRFRFFQVGLVSWGLYNPCLGSADKNSRKRAPRSKVPPPRDFHINLFRMQPWLRQHLGDVLNFLPL

SEQ ID NO: 418 - protein, 201 aa, synthetic construct
  CARBOHYD 56: note = N is linked to the N-linked glycan structure Hex(6)HexNAc(5)Fuc(0)NeuAc(3)
  CARBOHYD 56: note = N is linked to the glycan structure Hex(6)HexNAc(5)Fuc(1)NeuAc(3)
  CARBOHYD 72: note = N is linked to the N-linked glycan structure Hex(6)HexNAc(5)Fuc(0)NeuAc(3)
  CARBOHYD 72: note = N is linked to the glycan structure Hex(7)HexNAc(6)Fuc(0)NeuAc(3)
  CARBOHYD 72: note = N is linked to the glycan structure Hex(7)HexNAc(6)Fuc(1)Neu(5)Ac(3)
  CARBOHYD 72: note = N is linked to the glycan structure Hex(7)HexNAc(6)Fuc(1)NeuAc(4)
  CARBOHYD 72: note = N is linked to the N-linked glycan structure Hex(7)HexNAc(6)Fuc(0)NeuAc(4)
  CARBOHYD 93: note = N is linked to the glycan structure Hex(7)HexNAc(6)Fuc(1)Neu(5)Ac(2)
  CARBOHYD 93: note = N is linked to the N-linked glycan structure Hex(7)HexNAc(6)Fuc(0)NeuAc(2)
  CARBOHYD 103: note = N is linked to the glycan structure Hex(8)HexNAc(7)Fuc(0)NeuAc(4)
  CARBOHYD 93: note = N is linked to the glycan structure Hex(7)HexNAc(6)Fuc(1)NeuAc(4)
  CARBOHYD 103: note = N is linked to the glycan structure Hex(9)HexNAc(8)Fuc(0)NeuAc(4)
  CARBOHYD 103: note = N is linked to the glycan structure Hex(7)HexNAc(6)Fuc(0)NeuAc(3)
  CARBOHYD 103: note = N is linked to the N-linked glycan structure Hex(6)HexNAc(5)Fuc(0)NeuAc(3)
  CARBOHYD 103: note = N is linked to the glycan structure Hex(6)HexNAc(5)Fuc(1)NeuAc(3)
  CARBOHYD 103: note = N is linked to the N-linked glycan structure Hex(7)HexNAc(6)Fuc(0)NeuAc(2)
  CARBOHYD 103: note = N is linked to the glycan structure Hex(7)HexNAc(6)Fuc(1)NeuAc(4)
  CARBOHYD 93: note = N is linked to the N-linked glycan structure Hex(6)HexNAc(5)Fuc(0)NeuAc(3)
  CARBOHYD 93: note = N is linked to the glycan structure Hex(6)HexNAc(5)Fuc(1)NeuAc(3)
  CARBOHYD 93: note = N is linked to the glycan structure  Hex(7)HexNAc(6)F uc(1)Neu(5)Ac(3)
  CARBOHYD 103: note = N is linked to the N-linked glycan structure Hex(7)HexNAc(6)Fuc(0)NeuAc(4)
  CARBOHYD 93: note = N is linked to the glycan structure Hex(7)HexNAc(6)Fuc(0)NeuAc(3)
  CARBOHYD 93: note = N is linked to the N-linked glycan structure Hex(7)HexNAc(6)Fuc(0)NeuAc(4)
MALSWVLTVLSLLPLLEAQIPLCANLVPVPITNATLDQITGKWFYIASAFRNEEYNKSVQEIQATFFYFTPNKTEDTIFLREYQTRQDQCIYNTTYLNVQRENGTISRYVGGQEHFAHLLILRDTKTYMLAFDVNDEKNWGLSVYADKPETTKEQLGEFYEALDCLRIPKSDVVYTDWKKDKCEPLEKQHEKERKQEEGES

SEQ ID NO: 419 - protein, 423 aa, synthetic construct; identical to SEQ ID NO: 26
  CARBOHYD 271: note = N is linked to the N-linked glycan structure Hex(7)HexNAc(6)Fuc(0)NeuAc(2)
  CARBOHYD 271: note = N is linked to the glycan structure Hex(6)HexNAc(5)Fuc(1)NeuAc(3)
  CARBOHYD 106: note = N is linked to the glycan structure Hex(6)HexNAc(5)Fuc(1)NeuAc(3)
  CARBOHYD 106: note = N is linked to the glycan structure Hex(7)HexNAc(6)Fuc(1)NeuAc(4)
  CARBOHYD 106: note = N is linked to the N-linked glycan structure Hex(6)HexNAc(5)Fuc(0)NeuAc(3)
  CARBOHYD 106: note = N is linked to the N-linked glycan structure Hex(7)HexNAc(6)Fuc(0)NeuAc(4)
  CARBOHYD 271: note = N is linked to the glycan structure Hex(6)HexNAc(5)Fuc(0)NeuAc(2)
  CARBOHYD 271: note = N is linked to the glycan structure Hex(6)HexNAc(5)Fuc(1)NeuAc(1)
  CARBOHYD 127: note = N is linked to the N-linked glycan structure Hex(6)HexNAc(5)Fuc(0)NeuAc(3)
  CARBOHYD 271: note = N is linked to the glycan structure Hex(6)HexNAc(5)Fuc(1)NeuAc(2)

SEQ ID NO: 420 - protein, 1474 aa, synthetic construct; identical to SEQ ID NO: 25
  CARBOHYD 1424: note = N is linked to the N-linked glycan structure Hex(5)HexNAc(4)Fuc(0)NeuAc(2)
  CARBOHYD 1424: note = N is linked to the N-linked glycan structure Hex(5)HexNAc(4)Fuc(1)NeuAc(1)
  CARBOHYD 55: note = N is linked to the N-linked glycan structure Hex(5)HexNAc(4)Fuc(1)NeuAc(1)
  CARBOHYD 1424: note = N is linked to the glycan structure Hex(6)HexNAc(5)Fuc(0)NeuAc(1)
  CARBOHYD 1424: note = N is linked to the glycan structure Hex(6)HexNAc(5)Fuc(1)NeuAc(1)
  CARBOHYD 869: note = N is linked to the N-linked glycan structure Hex(5)HexNAc(4)Fuc(0)NeuAc(2)
  CARBOHYD 1424: note = N is linked to the N-linked glycan structure Hex(5)HexNAc(4)Fuc(1)NeuAc(2
  CARBOHYD 247: note = N is linked to the glycan structure Hex(5)HexNAc(2)Fuc(0)NeuAc(0)
  CARBOHYD 247: note = N is linked to the N-linked glycan structure Hex(5)HexNAc(4)Fuc(0)NeuAc(1)
  CARBOHYD 869: note = N is linked to the N-linked glycan structure Hex(5)HexNAc(4)Fuc(0)NeuAc(1)

SEQ ID NO: 421 - protein, 418 aa, synthetic construct; identical to SEQ ID NO: 24
  CARBOHYD 107: note = N is linked to the glycan structure Hex(6)HexNAc(5)Fuc(1)NeuAc(3)
  CARBOHYD 107: note = N is linked to the glycan structure Hex(6)HexNAc(5)Fuc(1)NeuAc(2)
  CARBOHYD 70: note = N is linked to the N-linked glycan structure Hex(5)HexNAc(4)Fuc(0)NeuAc(2)
  CARBOHYD 271: note = N is linked to the N-linked glycan structure Hex(5)HexNAc(4)Fuc(0)NeuAc(1)
  CARBOHYD 271: note = N is linked to the N-linked glycan structure Hex(5)HexNAc(4)Fuc(0)NeuAc(2)

SEQ ID NO: 422 - protein, 478 aa, synthetic construct; identical to SEQ ID NO: 69
  CARBOHYD 242: note = N is linked to the glycan structure Hex(6)HexNAc(5)Fuc(0)NeuAc(2)
  CARBOHYD 169: note = N is linked to the N-linked glycan structure Hex(5)HexNAc(4)Fuc(0)NeuAc(1)
  CARBOHYD 242: note = N is linked to the N-linked glycan structure Hex(6)HexNAc(5)Fuc(0)NeuAc(3)
  CARBOHYD 169: note = N is linked to the glycan structure Hex(6)HexNAc(3)Fuc(0)NeuAc(1)

SEQ ID NO: 423 - protein, 326 aa, synthetic construct; identical to SEQ ID NO: 157
  CARBOHYD 176: note = N is linked to the glycan structure Hex(3)HexNAc(5)Fuc(1)NeuAc(0)
  CARBOHYD 176: note = N is linked to the glycan structure Hex(4)HexNAc(5)Fuc(1)NeuAc(1)
  CARBOHYD 297: note = Q is linked to the glycan structure Hex(5)HexNAc(5)Fuc(1)NeuAc(0)
  CARBOHYD 297: note = N is linked to the N-linked glycan structure Hex(5)HexNAc(4)Fuc(0)NeuAc(0)
  CARBOHYD 297: note = N is linked to the glycan structure Hex(4)HexNAc(5)Fuc(1)NeuAc(0)
  CARBOHYD 176: note = N is linked to the glycan structure Hex(3)HexNAc(3)Fuc(1)NeuAc(0)
  CARBOHYD 175: note = N is linked to the N-linked glycan structure Hex(3)HexNAc(5)Fuc(0)NeuAc(0)
  CARBOHYD 175: note = N is linked to the glycan structure Hex(4)HexNAc(4)Fuc(1)NeuAc(0)
  CARBOHYD 175: note = N is linked to the N-linked glycan structure Hex(5)HexNAc(4)Fuc(1)NeuAc(0)

SEQ ID NO: 424 - protein, 1231 aa, synthetic construct; identical to SEQ ID NO: 42
  CARBOHYD 882: note = N is linked to the N-linked glycan structure Hex(5)HexNAc(4)Fuc(1)NeuAc(1)

SEQ ID NO: 425 - protein, 345 aa, synthetic construct; identical to SEQ ID NO: 128
  CARBOHYD 253: note = N is linked to the N-linked glycan structure Hex(5)HexNAc(4)Fuc(0)NeuAc(1)
  CARBOHYD 162: note = N is linked to the N-linked glycan structure Hex(6)HexNAc(5)Fuc(0)NeuAc(3)
  CARBOHYD 253: note = N is linked to the N-linked glycan structure Hex(5)HexNAc(4)Fuc(1)NeuAc(2)
  CARBOHYD 162: note = N is linked to the N-linked glycan structure Hex(5)HexNAc(4)Fuc(1)NeuAc(2)

SEQ ID NO: 426 - protein, 189 aa, synthetic construct; identical to SEQ ID NO: 43
  CARBOHYD 98: note = N is linked to the N-linked glycan structure Hex(5)HexNAc(4)Fuc(1)NeuAc(1)

SEQ ID NO: 427 - protein, 698 aa, synthetic construct; identical to SEQ ID NO: 76
  CARBOHYD 630: note = N is linked to the N-linked glycan structure Hex(5)HexNAc(4)Fuc(1)NeuAc(1)
  CARBOHYD 630: note = N is linked to the N-linked glycan structure Hex(5)HexNAc(4)Fuc(1)NeuAc(2)
  CARBOHYD 432: note = N is linked to the N-linked glycan structure Hex(6)HexNAc(5)Fuc(0)NeuAc(3)
  CARBOHYD 630: note = N is linked to the glycan structure Hex(6)HexNAc(5)Fuc(1)NeuAc(3)
  CARBOHYD 630: note = N is linked to the N-linked glycan structure Hex(5)HexNAc(4)Fuc(0)NeuAc(0)
  CARBOHYD 432: note = N is linked to the glycan structure Hex(6)HexNAc(5)Fuc(0)NeuAc(1)
  CARBOHYD 630: note = N is linked to the glycan structure Hex(6)HexNAc(5)Fuc(0)NeuAc(2)
  CARBOHYD 432: note = N is linked to the glycan structure Hex(6)HexNAc(5)Fuc(0)NeuAc(2)
  CARBOHYD 630: note = N is linked to the glycan structure Hex(5)HexNAc(4)Fuc(0)NeuAc(1)
  CARBOHYD 630: note = Q is linked to the N-linked glycan structure Hex(5)HexNAc(4)Fuc(0)NeuAc(2)

SEQ ID NO: 428 - protein, 14 aa, synthetic construct
  CARBOHYD 11: note = N is linked to the glycan structure Hex(5)HexNAc(2)Fuc(0)NeuAc(0)
QSVPAHFVALNGSK

SEQ ID NO: 429 - protein, 15 aa, synthetic construct
  CARBOHYD 7: note = N is linked to the glycan structure Hex(7)HexNAc(6)Fuc(1)Neu(5)Ac(2)
  CARBOHYD 7: note = N is linked to the N-linked glycan structure Hex(7)HexNAc(6)Fuc(0)NeuAc(2)
  CARBOHYD 7: note = N is linked to the N-linked glycan structure Hex(6)HexNAc(5)Fuc(0)NeuAc(3)
  CARBOHYD 7: note = N is linked to the glycan structure Hex(6)HexNAc(5)Fuc(1)NeuAc(3)
  CARBOHYD 7: note = N is linked to the glycan structure Hex(7)HexNAc(6)Fuc(1)Neu(5)Ac(3)
  CARBOHYD 7: note = N is linked to the glycan structure Hex(7)HexNAc(6)Fuc(1)NeuAc(4)
QDQCIYNTTYLNVQR

SEQ ID NO: 430 - protein, 16 aa, synthetic construct
  CARBOHYD 4: note = N is linked to the N-linked glycan structure Hex(7)HexNAc(6)Fuc(0)NeuAc(2)
  CARBOHYD 4: note = N is linked to the glycan structure  Hex(6)HexNAc(5)F uc(1)NeuAc(3)
  CARBOHYD 4: note = N is linked to the glycan structure Hex(6)HexNAc(5)Fuc(0)NeuAc(2)
YTGNASALFILPDQDK

SEQ ID NO: 431 - protein, 19 aa, synthetic construct
  CARBOHYD 3: note = N is linked to the N-linked glycan structure Hex(5)HexNAc(4)Fuc(0)NeuAc(2)
  CARBOHYD 3: note = N is linked to the N-linked glycan structure Hex(5)HexNAc(4)Fuc(1)NeuAc(1)
VSNQTLSLFFTVLQDVPVR

SEQ ID NO: 432 - protein, 20 aa, synthetic construct
  CARBOHYD 2: note = N is linked to the N-linked glycan structure Hex(5)HexNAc(4)Fuc(0)NeuAc(2)
ENLTAPGSDSAVFFEQGTTR

SEQ ID NO: 433 - protein, 15 aa, synthetic construct
  CARBOHYD 7: note = N is linked to the glycan structure Hex(5)HexNAc(3)Fuc(0)NeuAc(1)
FVEGSHNSTVSLTTK

SEQ ID NO: 434 - protein, 20 aa, synthetic construct
  CARBOHYD 2: note = N is linked to the glycan structure Hex(6)HexNAc(5)Fuc(1)NeuAc(3)
  CARBOHYD 2: note = N is linked to the glycan structure Hex(6)HexNAc(5)Fuc(0)NeuAc(3)
  CARBOHYD 2: note = N is linked to the N-linked glycan structure Hex(7)HexNAc(6)Fuc(0)NeuAc(4)
  CARBOHYD 2: note = N is linked to the glycan structure Hex(7)HexNAc(6)Fuc(1)NeuAc(4)
FNLTETSEAEIHQSFQHLLR

SEQ ID NO: 435 - protein, 32 aa, synthetic construct; identical to SEQ ID NO: 48
  CARBOHYD 14: note = N is linked to the glycan structure Hex(6)HexNAc(5)Fuc(1)NeuAc(3)

SEQ ID NO: 436 - protein, 27 aa, synthetic construct
  CARBOHYD 1: note = N is linked to the glycan structure Hex(6)HexNAc(5)Fuc(0)NeuAc(2)
  CARBOHYD 1: note = N is linked to the N-linked glycan structure Hex(6)HexNAc(5)Fuc(0)NeuAc(3)
NISDGFDGIPDNVDAALALPAHSYSGR

SEQ ID NO: 437 - protein, 9 aa, synthetic construct
  CARBOHYD 5: note = N is linked to the glycan structure Hex(3)HexNAc(5)Fuc(1)NeuAc(0)
  CARBOHYD 5: note = N is linked to the glycan structure Hex(4)HexNAc(5)Fuc(1)NeuAc(1)
  CARBOHYD 5: note = N is linked to the glycan structure Hex(3)HexNAc(3)Fuc(1)NeuAc(0)
EEQFNSTFR

SEQ ID NO: 438 - protein, 18 aa, synthetic construct
  CARBOHYD 15: note = N is linked to the N-linked glycan structure Hex(5)HexNAc(4)Fuc(1)NeuAc(1)
IPCSQPPQIEHGTINSSR

SEQ ID NO: 439 - protein, 7 aa, synthetic construct
  CARBOHYD 2: note = N is linked to the glycan structure Hex(8)HexNAc(7)Fuc(0)NeuAc(4)
  CARBOHYD 2: note = N is linked to the N-linked glycan structure Hex(6)HexNAc(5)Fuc(0)NeuAc(3)
  CARBOHYD 2: note = N is linked to the glycan structure Hex(6)HexNAc(5)Fuc(1)NeuAc(3)
  CARBOHYD 2: note = N is linked to the N-linked glycan structure Hex(7)HexNAc(6)Fuc(0)NeuAc(2)
  CARBOHYD 2: note = N is linked to the glycan structure Hex(7)HexNAc(6)Fuc(1)NeuAc(4)
ENGTISR

SEQ ID NO: 440 - protein, 11 aa, synthetic construct
  CARBOHYD 3: note = N is linked to the N-linked glycan structure Hex(5)HexNAc(4)Fuc(0)NeuAc(1)
LGNWSAMPSCK

SEQ ID NO: 441 - protein, 22 aa, synthetic construct
  CARBOHYD 16: note = N is linked to the N-linked glycan structure Hex(5)HexNAc(4)Fuc(1)NeuAc(1)
ADGTVNQIEGEATPVNLTEPAK

SEQ ID NO: 442 - protein, 21 aa, synthetic construct
  CARBOHYD 9: note = N is linked to the N-linked glycan structure Hex(5)HexNAc(4)Fuc(1)NeuAc(1)
  CARBOHYD 9: note = N is linked to the N-linked glycan structure Hex(5)HexNAc(4)Fuc(1)NeuAc(2)
QQQHLFGSNVTDCSGNFCLFR

SEQ ID NO: 443 - protein, 22 aa, synthetic construct
  CARBOHYD 9: note = N is linked to the N-linked glycan structure Hex(5)HexNAc(4)Fuc(1)NeuAc(1)
GCVLLSYLNETVTVSASLESVR

SEQ ID NO: 444 - protein, 367 aa, synthetic construct; identical to SEQ ID NO: 38
  CARBOHYD 176: note = N is linked to the glycan structure Hex(6)HexNAc(5)Fuc(1)NeuAc(3)
  CARBOHYD 176: note = N is linked to the N-linked glycan structure Hex(5)HexNAc(4)Fuc(0)NeuAc(1)
  CARBOHYD 346: note = S is linked to the O-linked glycan structure Hex(1)HexNAc(1)Fuc(0)NeuAc(2)
  CARBOHYD 156: note = N is linked to the N-linked glycan structure Hex(6)HexNAc(5)Fuc(0)NeuAc(3)
  CARBOHYD 156: note = N is linked to the glycan structure Hex(6)HexNAc(5)Fuc(1)NeuAc(3)
  CARBOHYD 176: note = N is linked to the glycan structure Hex(6)HexNAc(5)Fuc(0)NeuAc(2)
  CARBOHYD 176: note = N is linked to the glycan structure Hex(6)HexNAc(5)Fuc(0)NeuAc(1)
  CARBOHYD 176: note = N is linked to the N-linked glycan structure Hex(5)HexNAc(4)Fuc(0)NeuAc(2)

SEQ ID NO: 445 - protein, 347 aa, synthetic construct; identical to SEQ ID NO: 144
  CARBOHYD 186: note = N is linked to the N-linked glycan structure Hex(5)HexNAc(4)Fuc(0)NeuAc(2)

SEQ ID NO: 446 - protein, 147 aa, synthetic construct; identical to SEQ ID NO: 149

SEQ ID NO: 447 - protein, 599 aa, synthetic construct
MKLLKLTGFIFFLFFLTESLTLPTQPRDIENFNSTQKFIEDNIEYITIIAFAQYVQEATFEEMEKLVKDMVEYKDRCMADKTLPECSKLPNNVLQEKICAMEGLPQKHNFSHCCSKVDAQRRLCFFYNKKSDVGFLPPFPTLDPEEKCQAYESNRESLLNHFLYEVARRNPFVFAPTLLTVAVHFEEVAKSCCEEQNKVNCLQTRAIPVTQYLKAFSSYQKHVCGALLKFGTKVVHFIYIAILSQKFPKIEFKELISLVEDVSSNYDGCCEGDVVQCIRDTSKVMNHICSKQDSISSKIKECCEKKIPERGQCIINSNKDDRPKDLSLREGKFTDSENVCQERDADPDTFFAKFTFEYSRRHPDLSIPELLRIVQIYKDLLRNCCNTENPPGCYRYAEDKFNETTEKSLKMVQQECKHFQNLGKDGLKYHYLIRLTKIAPQLSTEELVSLGEKMVTAFTTCCTLSEEFACVDNLADLVFGELCGVNENRTINPAVDHCCKTNFAFRRPCFESLKADKTYVPPPFSQDLFTFHADMCQSQNEELQRKTDRFLVNLVKLKHELTDEELQSLFTNFANVVDKCCKAESPEVCFNEESPKIGN

SEQ ID NO: 448 - protein, 267 aa, synthetic construct; identical to SEQ ID NO: 145

SEQ ID NO: 449 - protein, 597 aa, synthetic construct
  CARBOHYD 221: note = N is linked to the N-linked glycan structure Hex(5)HexNAc(4)Fuc(0)NeuAc(2)
MHPPKTPSGALHRKRKMAAWPFSRLWKVSDPILFQMTLIAALLPAVLGNCGPPPTLSFAAPMDITLTETRFKTGTTLKYTCLPGYVRSHSTQTLTCNSDGEWVYNTFCIYKRCRHPGELRNGQVEIKTDLSFGSQIEFSCSEGFFLIGSTTSRCEVQDRGVGWSHPLPQCEIVKCKPPPDIRNGRHSGEENFYAYGFSVTYSCDPRFSLLGHASISCTVENETIGVWRPSPPTCEKITCRKPDVSHGEMVSGFGPIYNYKDTIVFKCQKGFVLRGSSVIHCDADSKWNPSPPACEPNSCINLPDIPHASWETYPRPTKEDVYVVGTVLRYRCHPGYKPTTDEPTTVICQKNLRWTPYQGCEALCCPEPKLNNGEITQHRKSRPANHCVYFYGDEISFSCHETSRFSAICQGDGTWSPRTPSCGDICNFPPKIAHGHYKQSSSYSFFKEEIIYECDKGYILVGQAKLSCSYSHWSAPAPQCKALCRKPELVNGRLSVDKDQYVEPENVTIQCDSGYGVVGPQSITCSGNRTWYPEVPKCEWETPEGCEQVLTGKRLMQCLPNPEDVKMALEVYKLSLEIEQLELQRDSARQSTLDKEL

SEQ ID NO: 450 - protein, 8 aa, synthetic construct
NGSLFAFR

SEQ ID NO: 451 - protein, 22 aa, synthetic construct
  CARBOHYD 11: note = N is linked to the glycan structure Hex(6)HexNAc(5)Fuc(1)NeuAc(3)
  CARBOHYD 11: note = N is linked to the glycan structure Hex(6)HexNAc(5)Fuc(0)NeuAc(2)
  CARBOHYD 11: note = N is linked to the glycan structure Hex(6)HexNAc(5)Fuc(0)NeuAc(1)
AALAAFNAQNNGSNFQLEEISR

SEQ ID NO: 452 - protein, 10 aa, synthetic construct
DLLLPQPDLR

SEQ ID NO: 453 - protein, 24 aa, synthetic construct
  CARBOHYD 6: note = N is linked to the glycan structure Hex(6)HexNAc(5)Fuc(1)NeuAc(3)
MVSHHNLTTGATLINEQWLLTTAK

SEQ ID NO: 454 - protein, 13 aa, synthetic construct
CGLVPVLAENYNK

SEQ ID NO: 455 - protein, 16 aa, synthetic construct
ALPQPQNVTSLLGCTH

SEQ ID NO: 456 - protein, 22 aa, synthetic construct
TSESGELHGLTTEEEFVEGIYK

SEQ ID NO: 457 - protein, 16 aa, synthetic construct
  CARBOHYD 6: note = N is linked to the glycan structure Hex(6)HexNAc(5)Fuc(1)NeuAc(3)
  CARBOHYD 6: note = N is linked to the glycan structure Hex(7)HexNAc(6)Fuc(1)Neu(5)Ac(3)
  CARBOHYD 6: note = N is linked to the glycan structure Hex(6)HexNAc(5)Fuc(1)NeuAc(1)
VVLHPNYSQVDIGLIK

SEQ ID NO: 458 - protein, 17 aa, synthetic construct
SDVGFLPPFPTLDPEEK

SEQ ID NO: 459 - protein, 12 aa, synthetic construct
VSFLSALEEYTK

SEQ ID NO: 460 - protein, 21 aa, synthetic construct
TVVQPSVGAAAGPVVPPCPGR

SEQ ID NO: 461 - protein, 11 aa, synthetic construct
THLAPYSDELR

SEQ ID NO: 462 - protein, 30 aa, synthetic construct
FSLLGHASISCTVENETIGVWRPSPPTCEK

SEQ ID NO: 463 - protein, 201 aa, synthetic construct; identical to SEQ ID NO: 28
  CARBOHYD 56: note = N is linked to the N-linked glycan structure Hex(6)HexNAc(5)Fuc(0)NeuAc(3)
  CARBOHYD 56: note = N is linked to the glycan structure Hex(6)HexNAc(5)Fuc(1)NeuAc(3)
  CARBOHYD 72: note = N is linked to the N-linked glycan structure Hex(6)HexNAc(5)Fuc(0)NeuAc(3)
  CARBOHYD 72: note = N is linked to the glycan structure Hex(7)HexNAc(6)Fuc(0)NeuAc(3)
  CARBOHYD 72: note = N is linked to the glycan structure Hex(6)HexNAc(5)Fuc(1)NeuAc(3)
  CARBOHYD 72: note = N is linked to the glycan structure Hex(7)HexNAc(6)Fuc(1)Neu(5)Ac(3)
  CARBOHYD 72: note = N is linked to the glycan structure Hex(7)HexNAc(6)Fuc(1)NeuAc(4)
  CARBOHYD 72: note = N is linked to the N-linked glycan structure Hex(7)HexNAc(6)Fuc(0)NeuAc(4)
  CARBOHYD 103: note = N is linked to the glycan structure Hex(6)HexNAc(5)Fuc(1)NeuAc(3)
  CARBOHYD 103: note = N is linked to the N-linked glycan structure Hex(6)HexNAc(5)Fuc(0)NeuAc(3)
  CARBOHYD 103: note = N is linked to the N-linked glycan structure Hex(7)HexNAc(6)Fuc(0)NeuAc(4)
  CARBOHYD 103: note = N is linked to the glycan structure Hex(7)HexNAc(6)Fuc(1)NeuAc(4)

SEQ ID NO: 464 - protein, 644 aa, synthetic construct; identical to SEQ ID NO: 180
  CARBOHYD 432: note = G is linked to the N-linked glycan structure Hex(5)HexNAc(4)Fuc(0)NeuAc(1)
  CARBOHYD 630: note = Q is linked to the glycan structure Hex(6)HexNAc(5)Fuc(1)NeuAc(3)
  CARBOHYD 630: note = Q is linked to the glycan structure Hex(5)HexNAc(4)Fuc(0)NeuAc(1)
  CARBOHYD 630: note = Q is linked to the N-linked glycan structure Hex(5)HexNAc(4)Fuc(0)NeuAc(2)
  CARBOHYD 630: note = Q is linked to the N-linked glycan structure Hex(5)HexNAc(4)Fuc(0)NeuAc(0)
  CARBOHYD 205: note = N is linked to the glycan structure Hex(6)HexNAc(5)Fuc(1)NeuAc(3)
  CARBOHYD 294: note = N is linked to the N-linked glycan structure Hex(6)HexNAc(5)Fuc(0)NeuAc(3)
  CARBOHYD 209: note = E is linked to the glycan structure Hex(5)HexNAc(5)Fuc(0)NeuAc(0)

SEQ ID NO: 465 - protein, 6 aa, synthetic construct
  CARBOHYD 5: note = N is linked to the N-linked glycan structure Hex(6)HexNAc(5)Fuc(0)NeuAc(3)
  CARBOHYD 5: note = N is linked to the glycan structure Hex(6)HexNAc(5)Fuc(1)NeuAc(3)
NEEYNK

SEQ ID NO: 466 - protein, 16 aa, synthetic construct
  CARBOHYD 15: note = N is linked to the N-linked glycan structure Hex(6)HexNAc(5)Fuc(0)NeuAc(3)
  CARBOHYD 15: note = N is linked to the glycan structure Hex(7)HexNAc(6)Fuc(0)NeuAc(3)
SVQEIQATFFYFTPNK

SEQ ID NO: 467 - protein, 7 aa, synthetic construct
  CARBOHYD 2: note = N is linked to the glycan structure Hex(6)HexNAc(5)Fuc(1)NeuAc(3)
ENGTVSR

SEQ ID NO: 468 - protein, 11 aa, synthetic construct
  CARBOHYD 8: note = P is linked to the N-linked glycan structure Hex(6)HexNAc(5)Fuc(0)NeuAc(3)
LGNWSAMPSCK

SEQ ID NO: 469 - protein, 20 aa, synthetic construct
  CARBOHYD 2: note = N is linked to the glycan structure Hex(6)HexNAc(5)Fuc(1)NeuAc(3)
ENLTAPGSDSAVFFEQGTTR

SEQ ID NO: 470 - protein, 17 aa, synthetic construct
  CARBOHYD 9: note = N is linked to the glycan structure Hex(6)HexNAc(5)Fuc(1)NeuAc(3)
ELHHLQEQNVSNAFLDK

SEQ ID NO: 471 - protein, 15 aa, synthetic construct
  CARBOHYD 12: note = N is linked to the N-linked glycan structure Hex(6)HexNAc(5)Fuc(0)NeuAc(3)
VCQDCPLLAPLNDTR

SEQ ID NO: 472 - protein, 13 aa, synthetic construct
  CARBOHYD 7: note = N is linked to the N-linked glycan structure Hex(6)HexNAc(5)Fuc(0)NeuAc(3)
  CARBOHYD 7: note = N is linked to the glycan structure Hex(6)HexNAc(5)Fuc(1)NeuAc(3)
SWPAVGNCSSALR

SEQ ID NO: 473 - protein, 13 aa, synthetic construct
  CARBOHYD 9: note = S is linked to the glycan structure Hex(6)HexNAc(5)Fuc(1)NeuAc(3)
SWPAVGNCSSALR

SEQ ID NO: 474 - protein, 12 aa, synthetic construct
  CARBOHYD 6: note = V is linked to the N-linked glycan structure Hex(6)HexNAc(5)Fuc(0)NeuAc(3)
  CARBOHYD 9: note = N is linked to the N-linked glycan structure Hex(5)HexNAc(4)Fuc(0)NeuAc(2)
ITYSIVQTNCSK

SEQ ID NO: 475 - protein, 16 aa, synthetic construct
  CARBOHYD 4: note = N is linked to the glycan structure Hex(6)HexNAc(5)Fuc(1)NeuAc(1)
YTGNASALFILPDQDK

SEQ ID NO: 476 - protein, 7 aa, synthetic construct
ENGTISR

SEQ ID NO: 477 - protein, 7 aa, synthetic construct
ENGTISR

SEQ ID NO: 478 - protein, 7 aa, synthetic construct
ENGTISR

SEQ ID NO: 479 - protein, 15 aa, synthetic construct
QDQCIYNTTYLNVQR

SEQ ID NO: 480 - protein, 15 aa, synthetic construct
  CARBOHYD 7: note = N is linked to the N-linked glycan structure Hex(7)HexNAc(6)Fuc(0)NeuAc(4)
QDQCIYNTTYLNVQR

SEQ ID NO: 481 - protein, 15 aa, synthetic construct
QDQCIYNTTYLNVQR

SEQ ID NO: 482 - protein, 15 aa, synthetic construct
QDQCIYNTTYLNVQR

SEQ ID NO: 483 - protein, 6 aa, synthetic construct
  CARBOHYD 5: note = N is linked to the N-linked glycan structure Hex(6)HexNAc(5)Fuc(0)NeuAc(3)
NEEYNK

SEQ ID NO: 484 - protein, 16 aa, synthetic construct
  CARBOHYD 15: note = N is linked to the N-linked glycan structure Hex(6)HexNAc(5)Fuc(0)NeuAc(3)
SVQEIQATFFYFTPNK

SEQ ID NO: 485 - protein, 16 aa, synthetic construct
  CARBOHYD 15: note = N is linked to the N-linked glycan structure Hex(7)HexNAc(6)Fuc(0)NeuAc(4)
SVQEIQATFFYFTPNK

SEQ ID NO: 486 - protein, 24 aa, synthetic construct
  CARBOHYD 15: note = N is linked to the N-linked glycan structure Hex(7)HexNAc(6)Fuc(0)NeuAc(4)
SVQEIQATFFYFTPNKTEDTIFLR

SEQ ID NO: 487 - protein, 24 aa, synthetic construct
  CARBOHYD 15: note = N is linked to the glycan structure Hex(7)HexNAc(6)Fuc(1)NeuAc(4)
SVQEIQATFFYFTPNKTEDTIFLR

SEQ ID NO: 488 - protein, 13 aa, synthetic construct
  CARBOHYD 8: note = N is linked to the N-linked glycan structure Hex(6)HexNAc(5)Fuc(0)NeuAc(3)
  CARBOHYD 8: note = N is linked to the N-linked glycan structure Hex(5)HexNAc(4)Fuc(1)NeuAc(2)
VYKPSAGNNSLYR

SEQ ID NO: 489 - protein, 17 aa, synthetic construct
  CARBOHYD 9: note = N is linked to the glycan structure Hex(6)HexNAc(5)Fuc(1)NeuAc(3)
ELHHLQEQNVSNAFLDK

SEQ ID NO: 490 - protein, 13 aa, synthetic construct
  CARBOHYD 7: note = N is linked to the N-linked glycan structure Hex(6)HexNAc(5)Fuc(0)NeuAc(3)
SWPAVGNCSSALR

SEQ ID NO: 491 - protein, 24 aa, synthetic construct
  CARBOHYD 6: note = N is linked to the glycan structure Hex(6)HexNAc(5)Fuc(1)NeuAc(3)
  CARBOHYD 6: note = N is linked to the N-linked glycan structure Hex(5)HexNAc(4)Fuc(0)NeuAc(2)
MVSHHNLTTGATLINEQWLLTTAK

SEQ ID NO: 492 - protein, 13 aa, synthetic construct
  CARBOHYD 5: note = N is linked to the N-linked glycan structure Hex(5)HexNAc(4)Fuc(0)NeuAc(2)
  CARBOHYD 9: note = N is linked to the N-linked glycan structure Hex(6)HexNAc(5)Fuc(0)NeuAc(3)
NLFLNHSENATAK

SEQ ID NO: 493 - protein, 13 aa, synthetic construct
  CARBOHYD 5: note = N is linked to the glycan structure Hex(6)HexNAc(5)Fuc(0)NeuAc(2)
  CARBOHYD 9: note = N is linked to the glycan structure Hex(6)HexNAc(5)Fuc(0)NeuAc(3)
NLFLNHSENATAK

SEQ ID NO: 494 - protein, 16 aa, synthetic construct
  CARBOHYD 6: note = N is linked to the glycan structure Hex(6)HexNAc(5)Fuc(0)NeuAc(3)
  CARBOHYD 6: note = N is linked to the glycan structure Hex(6)HexNAc(5)Fuc(1)NeuAc(1)
VVLHPNYSQVDIGLIK

SEQ ID NO: 495 - protein, 16 aa, synthetic construct
  CARBOHYD 6: note = N is linked to the glycan structure Hex(6)HexNAc(5)Fuc(1)NeuAc(3)
  CARBOHYD 6: note = N is linked to the glycan structure Hex(6)HexNAc(5)Fuc(1)NeuAc(1)
VVLHPNYSQVDIGLIK

SEQ ID NO: 496 - protein, 16 aa, synthetic construct
  CARBOHYD 6: note = N is linked to the glycan structure Hex(7)HexNAc(6)Fuc(1)Neu(5)Ac(3)
  CARBOHYD 6: note = N is linked to the glycan structure Hex(6)HexNAc(5)Fuc(1)NeuAc(1)
VVLHPNYSQVDIGLIK

SEQ ID NO: 497 - protein, 12 aa, synthetic construct
  CARBOHYD 9: note = N is linked to the glycan structure Hex(6)HexNAc(5)Fuc(1)NeuAc(3)
  CARBOHYD 9: note = N is linked to the N-linked glycan structure Hex(5)HexNAc(4)Fuc(0)NeuAc(2)
ITYSIVQTNCSK

SEQ ID NO: 498 - protein, 12 aa, synthetic construct
  CARBOHYD 6: note = N is linked to the N-linked glycan structure Hex(6)HexNAc(5)Fuc(0)NeuAc(3)
LNAENNATFYFK

SEQ ID NO: 499 - protein, 21 aa, synthetic construct
  CARBOHYD 9: note = N is linked to the glycan structure Hex(6)HexNAc(5)Fuc(1)NeuAc(3)
QQQHLFGSNVTDCSGNFCLFR

SEQ ID NO: 500 - protein, 32 aa, synthetic construct; identical to SEQ ID NO: 48
  CARBOHYD 14: note = N is linked to the glycan structure Hex(6)HexNAc(5)Fuc(1)NeuAc(2)

SEQ ID NO: 501 - protein, 19 aa, synthetic construct
  CARBOHYD 3: note = N is linked to the glycan structure Hex(6)HexNAc(5)Fuc(0)NeuAc(1)
VSNQTLSLFFTVLQDVPVR

SEQ ID NO: 502 - protein, 19 aa, synthetic construct
  CARBOHYD 3: note = N is linked to the glycan structure Hex(6)HexNAc(5)Fuc(1)NeuAc(1)
VSNQTLSLFFTVLQDVPVR

SEQ ID NO: 503 - protein, 20 aa, synthetic construct
  CARBOHYD 2: note = N is linked to the N-linked glycan structure Hex(6)HexNAc(5)Fuc(0)NeuAc(3)
FNLTETSEAEIHQSFQHLLR

SEQ ID NO: 504 - protein, 20 aa, synthetic construct
  CARBOHYD 2: note = N is linked to the N-linked glycan structure Hex(7)HexNAc(6)Fuc(0)NeuAc(4)
FNLTETSEAEIHQSFQHLLR

SEQ ID NO: 505 - protein, 20 aa, synthetic construct
  CARBOHYD 2: note = N is linked to the glycan structure Hex(7)HexNAc(6)Fuc(1)NeuAc(4)
FNLTETSEAEIHQSFQHLLR

SEQ ID NO: 506 - protein, 16 aa, synthetic construct
  CARBOHYD 4: note = N is linked to the glycan structure Hex(6)HexNAc(5)Fuc(0)NeuAc(2)
YTGNASALFILPDQDK

SEQ ID NO: 507 - protein, 16 aa, synthetic construct
  CARBOHYD 4: note = N is linked to the N-linked glycan structure Hex(6)HexNAc(5)Fuc(0)NeuAc(3)
YTGNASALFILPDQDK

SEQ ID NO: 508 - protein, 6 aa, synthetic construct
  CARBOHYD 5: note = N is linked to the N-linked glycan structure Hex(6)HexNAc(5)Fuc(0)NeuAc(3)
NEEYNK

SEQ ID NO: 509 - protein, 24 aa, synthetic construct
  CARBOHYD 15: note = N is linked to the N-linked glycan structure Hex(6)HexNAc(5)Fuc(0)NeuAc(3)
SVQEIQATFFYFTPNKTEDTIFLR

SEQ ID NO: 510 - protein, 24 aa, synthetic construct
  CARBOHYD 15: note = N is linked to the glycan structure Hex(6)HexNAc(5)Fuc(1)NeuAc(3)
SVQEIQATFFYFTPNKTEDTIFLR

SEQ ID NO: 511 - protein, 24 aa, synthetic construct
  CARBOHYD 15: note = N is linked to the glycan structure (7)HexNAc(6)Fuc(1)Neu(5)Ac(3)
SVQEIQATFFYFTPNKTEDTIFLR

SEQ ID NO: 512 - protein, 24 aa, synthetic construct
SVQEIQATFFYFTPNKTEDTIFLR

SEQ ID NO: 513 - protein, 16 aa, synthetic construct
  CARBOHYD 15: note = N is linked to the N-linked glycan structure Hex(6)HexNAc(5)Fuc(0)NeuAc(3)
SVQEIQATFFYFTPNK

SEQ ID NO: 514 - protein, 16 aa, synthetic construct
  CARBOHYD 15: note = N is linked to the glycan structure Hex(7)HexNAc(6)Fuc(0)NeuAc(3)
SVQEIQATFFYFTPNK

SEQ ID NO: 515 - protein, 16 aa, synthetic construct
  CARBOHYD 15: note = N is linked to the N-linked glycan structure Hex(7)HexNAc(6)Fuc(0)NeuAc(4)
SVQEIQATFFYFTPNK

SEQ ID NO: 516 - protein, 7 aa, synthetic construct
  CARBOHYD 2: note = N is linked to the N-linked glycan structure Hex(6)HexNAc(5)Fuc(0)NeuAc(3)
ENGTISR

SEQ ID NO: 517 - protein, 7 aa, synthetic construct
  CARBOHYD 2: note = N is linked to the glycan structure Hex(6)HexNAc(5)Fuc(1)NeuAc(3)
ENGTISR

SEQ ID NO: 518 - protein, 7 aa, synthetic construct
  CARBOHYD 2: note = N is linked to the N-linked glycan structure Hex(7)HexNAc(6)Fuc(0)NeuAc(2)
ENGTISR

SEQ ID NO: 519 - protein, 7 aa, synthetic construct
  CARBOHYD 2: note = N is linked to the N-linked glycan structure Hex(7)HexNAc(6)Fuc(0)NeuAc(4)
ENGTISR

SEQ ID NO: 520 - protein, 7 aa, synthetic construct
  CARBOHYD 2: note = N is linked to the glycan structure Hex(7)HexNAc(6)Fuc(1)NeuAc(4)
ENGTISR

SEQ ID NO: 521 - protein, 15 aa, synthetic construct
  CARBOHYD 7: note = N is linked to the N-linked glycan structure Hex(6)HexNAc(5)Fuc(0)NeuAc(3)
QDQCIYNTTYLNVQR

SEQ ID NO: 522 - protein, 15 aa, synthetic construct
  CARBOHYD 7: note = N is linked to the N-linked glycan structure Hex(7)HexNAc(6)Fuc(0)NeuAc(2)
QDQCIYNTTYLNVQR

SEQ ID NO: 523 - protein, 15 aa, synthetic construct
  CARBOHYD 7: note = N is linked to the glycan structure Hex(7)HexNAc(6)Fuc(0)NeuAc(3)
QDQCIYNTTYLNVQR

SEQ ID NO: 524 - protein, 15 aa, synthetic construct
  CARBOHYD 7: note = N is linked to the N-linked glycan structure Hex(7)HexNAc(6)Fuc(0)NeuAc(4)
QDQCIYNTTYLNVQR

SEQ ID NO: 525 - protein, 15 aa, synthetic construct
  CARBOHYD 7: note = N is linked to the glycan structure Hex(7)HexNAc(6)Fuc(1)Neu(5)Ac(2)
QDQCIYNTTYLNVQR

SEQ ID NO: 526 - protein, 15 aa, synthetic construct
  CARBOHYD 7: note = N is linked to the glycan structure Hex(7)HexNAc(6)Fuc(1)Neu(5)Ac(3)
QDQCIYNTTYLNVQR

SEQ ID NO: 527 - protein, 15 aa, synthetic construct
  CARBOHYD 7: note = N is linked to the glycan structure Hex(7)HexNAc(6)Fuc(1)NeuAc(4)
QDQCIYNTTYLNVQR

SEQ ID NO: 528 - protein, 7 aa, synthetic construct
  CARBOHYD 2: note = N is linked to the N-linked glycan structure Hex(6)HexNAc(5)Fuc(0)NeuAc(3)
ENGTVSR

SEQ ID NO: 529 - protein, 7 aa, synthetic construct
  CARBOHYD 2: note = N is linked to the glycan structure Hex(6)HexNAc(5)Fuc(1)NeuAc(3)
ENGTVSR

SEQ ID NO: 530 - protein, 7 aa, synthetic construct
  CARBOHYD 2: note = N is linked to the N-linked glycan structure Hex(7)HexNAc(6)Fuc(0)NeuAc(4)
ENGTVSR

SEQ ID NO: 531 - protein, 13 aa, synthetic construct
  CARBOHYD 8: note = N is linked to the N-linked glycan structure Hex(6)HexNAc(5)Fuc(0)NeuAc(3)
  CARBOHYD 8: note = N is linked to the N-linked glycan structure Hex(5)HexNAc(4)Fuc(1)NeuAc(2)
VYKPSAGNNSLYR

SEQ ID NO: 532 - protein, 11 aa, synthetic construct
  CARBOHYD 3: note = N is linked to the N-linked glycan structure Hex(5)HexNAc(4)Fuc(1)NeuAc(2)
LGNWSAMPSCK

SEQ ID NO: 533 - protein, 20 aa, synthetic construct
  CARBOHYD 2: note = N is linked to the glycan structure Hex(6)HexNAc(5)Fuc(1)NeuAc(3)
ENLTAPGSDSAVFFEQGTTR

SEQ ID NO: 534 - protein, 17 aa, synthetic construct
  CARBOHYD 9: note = N is linked to the N-linked glycan structure Hex(6)HexNAc(5)Fuc(0)NeuAc(3)
ELHHLQEQNVSNAFLDK

SEQ ID NO: 535 - protein, 15 aa, synthetic construct
  CARBOHYD 12: note = N is linked to the N-linked glycan structure Hex(6)HexNAc(5)Fuc(0)NeuAc(3)
VCQDCPLLAPLNDTR

SEQ ID NO: 536 - protein, 15 aa, synthetic construct
  CARBOHYD 12: note = N is linked to the glycan structure Hex(6)HexNAc(5)Fuc(1)NeuAc(3)
VCQDCPLLAPLNDTR

SEQ ID NO: 537 - protein, 22 aa, synthetic construct
  CARBOHYD 11: note = N is linked to the glycan structure Hex(6)HexNAc(5)Fuc(1)NeuAc(3)
  CARBOHYD 11: note = N is linked to the glycan structure Hex(6)HexNAc(5)Fuc(0)NeuAc(2)
  CARBOHYD 11: note = N is linked to the glycan structure Hex(6)HexNAc(5)Fuc(0)NeuAc(1)
AALAAFNAQNNGSNFQLEEISR

SEQ ID NO: 538 - protein, 13 aa, synthetic construct
  CARBOHYD 7: note = N is linked to the N-linked glycan structure Hex(6)HexNAc(5)Fuc(0)NeuAc(3)
SWPAVGNCSSALR

SEQ ID NO: 539 - protein, 13 aa, synthetic construct
  CARBOHYD 7: note = N is linked to the glycan structure Hex(6)HexNAc(5)Fuc(1)NeuAc(3)
SWPAVGNCSSALR

SEQ ID NO: 540 - protein, 24 aa, synthetic construct
  CARBOHYD 6: note = N is linked to the glycan structure Hex(6)HexNAc(5)Fuc(1)NeuAc(3)
  CARBOHYD 6: note = N is linked to the N-linked glycan structure Hex(5)HexNAc(4)Fuc(0)NeuAc(2)
MVSHHNLTTGATLINEQWLLTTAK

SEQ ID NO: 541 - protein, 13 aa, synthetic construct
  CARBOHYD 5: note = N is linked to the N-linked glycan structure Hex(5)HexNAc(4)Fuc(0)NeuAc(2)
  CARBOHYD 9: note = N is linked to the glycan structure Hex(6)HexNAc(5)Fuc(0)NeuAc(2)
NLFLNHSENATAK

SEQ ID NO: 542 - protein, 13 aa, synthetic construct
  CARBOHYD 5: note = N is linked to the N-linked glycan structure Hex(5)HexNAc(4)Fuc(0)NeuAc(2)
  CARBOHYD 9: note = N is linked to the glycan structure Hex(6)HexNAc(5)Fuc(1)NeuAc(2)
NLFLNHSENATAK

SEQ ID NO: 543 - protein, 13 aa, synthetic construct
  CARBOHYD 5: note = N is linked to the N-linked glycan structure Hex(5)HexNAc(4)Fuc(0)NeuAc(2)
  CARBOHYD 9: note = N is linked to the glycan structure Hex(6)HexNAc(5)Fuc(1)NeuAc(3)
NLFLNHSENATAK

SEQ ID NO: 544 - protein, 13 aa, synthetic construct
  CARBOHYD 5: note = N is linked to the glycan structure Hex(6)HexNAc(5)Fuc(0)NeuAc(2)
  CARBOHYD 9: note = N is linked to the N-linked glycan structure Hex(6)HexNAc(5)Fuc(0)NeuAc(3)
NLFLNHSENATAK

SEQ ID NO: 545 - protein, 16 aa, synthetic construct
  CARBOHYD 6: note = N is linked to the glycan structure Hex(6)HexNAc(5)Fuc(1)NeuAc(1)
VVLHPNYSQVDIGLIK

SEQ ID NO: 546 - protein, 16 aa, synthetic construct
  CARBOHYD 6: note = N is linked to the glycan structure Hex(6)HexNAc(5)Fuc(1)NeuAc(2)
  CARBOHYD 6: note = N is linked to the glycan structure Hex(6)HexNAc(5)Fuc(1)NeuAc(1)
VVLHPNYSQVDIGLIK

SEQ ID NO: 547 - protein, 16 aa, synthetic construct
  CARBOHYD 6: note = N is linked to the glycan structure Hex(6)HexNAc(5)Fuc(1)NeuAc(3)
  CARBOHYD 6: note = N is linked to the glycan structure Hex(6)HexNAc(5)Fuc(1)NeuAc(1)
  CARBOHYD 6: note = N is linked to the glycan structure Hex(6)HexNAc(5)Fuc(1)NeuAc(1)
VVLHPNYSQVDIGLIK

SEQ ID NO: 548 - protein, 16 aa, synthetic construct
  CARBOHYD 6: note = N is linked to the glycan structure Hex(7)HexNAc(6)Fuc(1)Neu(5)Ac(3)
  CARBOHYD 6: note = N is linked to the glycan structure Hex(6)HexNAc(5)Fuc(1)NeuAc(1)
VVLHPNYSQVDIGLIK

SEQ ID NO: 549 - protein, 12 aa, synthetic construct
  CARBOHYD 6: note = N is linked to the N-linked glycan structure Hex(6)HexNAc(5)Fuc(0)NeuAc(3)
LNAENNATFYFK

SEQ ID NO: 550 - protein, 399 aa, synthetic construct; identical to SEQ ID NO: 34

SEQ ID NO: 551 - protein, 395 aa, synthetic construct; identical to SEQ ID NO: 35

SEQ ID NO: 552 - protein, 415 aa, synthetic construct
MSPFLYLVLLVLGLHATIHCASPEGKVTACHSSQPNATLYKMSSINADFAFNLYRRFTVETPDKNIFFSPVSISAALVMLSFGACCSTQTEIVETLGFNLTDTPMVEIQHGFQHLICSLNFPKKELELQIGNALFIGKHLKPLAKFLNDVKTLYETEVFSTDFSNISAAKQEINSHVEMQTKGKVVGLIQDLKPNTIMVLVNYIHFKAQWANPFDPSKTEDSSSFLIDKTTTVQVPMMHQMEQYYHLVDMELNCTVLQMDYSKNALALFVLPKEGQMESVEAAMSSKTLKKWNRLLQKGWVDLFVPKFSISATYDLGATLLKMGIQHAYSENADFSGLTEDNGLKLSNAAHKAVLHIGEKGTEAAAVPEVELSDQPENTFLHPIIQIDRSFMLLILERSTRSILFLGKVVNPTEA

SEQ ID NO: 553 - protein, 201 aa, synthetic construct; identical to SEQ ID NO: 27

SEQ ID NO: 554 - protein, 591 aa, synthetic construct
MKNSRTWAWRAPVELFLLCAALGCLSLPGSRGERPHSFGSNAVNKSFAKSRQMRSVDVTLMPIDCELSSWSSWTTCDPCQKKRYRYAYLLQPSQFHGEPCNFSDKEVEDCVTNRPCRSQVRCEGFVCAQTGRCVNRRLLCNGDNDCGDQSDEANCRRIYKKCQHEMDQYWGIGSLASGINLFTNSFEGPVLDHRYYAGGCSPHYILNTRFRKPYNVESYTPQTQGKYEFILKEYESYSDFERNVTEKMASKSGFSFGFKIPGIFELGISSQSDRGKHYIRRTKRFSHTKSVFLHARSDLEVAHYKLKPRSLMLHYEFLQRVKRLPLEYSYGEYRDLFRDFGTHYITEAVLGGIYEYTLVMNKEAMERGDYTLNNVHACAKNDFKIGGAIEEVYVSLGVSVGKCRGILNEIKDRNKRDTMVEDLVVLVRGGASEHITTLAYQELPTADLMQEWGDAVQYNPAIIKVKVEPLYELVTATDFAYSSTVRQNMKQALEEFQKEVSSCHCAPCQGNGVPVLKGSRCDCICPVGSQGLACEVSYRKNTPIDGKWNCWSNWSSCSGRRKTRQRQCNNPPPQNGGSPCSGPASETLDCS

SEQ ID NO: 555 - protein, 398 aa, synthetic construct; identical to SEQ ID NO: 32

SEQ ID NO: 556 - protein, 638 aa, synthetic construct; identical to SEQ ID NO: 36

SEQ ID NO: 557 - protein, 423 aa, synthetic construct; identical to SEQ ID NO: 26

SEQ ID NO: 558 - protein, 367 aa, synthetic construct; identical to SEQ ID NO: 38

SEQ ID NO: 559 - protein, 449 aa, synthetic construct
MMKTLLLFVGLLLTWESGQVLGDQTVSDNELQEMSNQGSKYVNKEIQNAVNGVKQIKTLIEKTNEERKTLLSNLEEAKKKKEDALNETRESETKLKELPGVCNETMMALWEECKPCLKQTCMKFYARVCRSGSGLVGRQLEEFLNQSSPFYFWMNGDRIDSLLENDRQQTHMLDVMQDHFSRASSIIDELFQDRFFTREPQDTYHYLPFSLPHRRPHFFFPKSRIVRSLMPFSPYEPLNFHAMFQPFLEMIHEAQQAMDIHFHSPAFQHPPTEFIREGDDDRTVCREIRHNSTGCLRMKDQCDKCREILSVDCSTNNPSQAKLRRELDESLQVAERLTRKYNELLKSYQWKMLNTSSLLEQLNEQFNWVSRLANLTQGEDQYYLRVTTVASHTSDSDVPSGVTEVVVKLFDSDPITVTVPVEVSRKNPKFMETVAEKALQEYRKKHREE

SEQ ID NO: 560 - protein, 1474 aa, synthetic construct; identical to SEQ ID NO: 25

SEQ ID NO: 561 - protein, 1231 aa, synthetic construct; identical to SEQ ID NO: 42

SEQ ID NO: 562 - protein, 462 aa, synthetic construct; identical to SEQ ID NO: 39

SEQ ID NO: 563 - protein, 446 aa, synthetic construct
ASTKGPSVFPLAPCSRSTSGGTAALGCLVKDYFPEPVTVSWNSGALTSGVHTFPAVLQSSGLYSLSSVVTVPSSSLGTQTYTCNVNHKPSNTKVDKRVELKTPLGDTTHTCPRCPEPKSCDTPPPCPRCPEPKSCDTPPPCPRCPEPKSCDTPPPCPRCPAPELLGGPSVFLFPPKPKDTLMISRTPEVTCVVVDVSHEDPEVQFKWYVDGVEVHNAKTKPREEQYNSTFRVVSVLTVLHQDWLNGKEYKCKVSNKALPAPIEKTISKTKGQPREPQVYTLPPSREEMTKNQVSLTCLVKGFYPSDIAVEWESSGQPENNYNTTPPMLDSDGSFFLYSKLTVDKSRWQQGNIFSCSVMHEALHNRFTQKSLSLSPELQLEESCAEAQDGELDGLWTTITIFITLFLLSVCYSATVTFFKVKWIFSSVVDLKQTIIPDYRNMIGQGA

SEQ ID NO: 564 - protein, 698 aa, synthetic construct; identical to SEQ ID NO: 76

SEQ ID NO: 565 - protein, 406 aa, synthetic construct; identical to SEQ ID NO: 135

SEQ ID NO: 566 - protein, 478 aa, synthetic construct; identical to SEQ ID NO: 69

SEQ ID NO: 567 - protein, 930 aa, synthetic construct
MKPPRPVRTCSKVLVLLSLLAIHQTTTAEKNGIDIYSLTVDSRVSSRFAHTVVTSRVVNRANTVQEATFQMELPKKAFITNFSMIIDGMTYPGIIKEKAEAQAQYSAAVAKGKSAGLVKATGRNMEQFQVSVSVAPNAKITFELVYEELLKRRLGVYELLLKVRPQQLVKHLQMDIHIFEPQGISFLETESTFMTNQLVDALTTWQNKTKAHIRFKPTLSQQQKSPEQQETVLDGNLIIRYDVDRAISGGSIQIENGYFVHYFAPEGLTTMPKNVVFVIDKSGSMSGRKIQQTREALIKILDDLSPRDQFNLIVFSTEATQWRPSLVPASAENVNKARSFAAGIQALGGTNINDAMLMAVQLLDSSNQEERLPEGSVSLIILLTDGDPTVGETNPRSIQNNVREAVSGRYSLFCLGFGFDVSYAFLEKLALDNGGLARRIHEDSDSALQLQDFYQEVANPLLTAVTFEYPSNAVEEVTQNNFRLLFKGSEMVVAGKLQDRGPDVLTATVSGKLPTQNITFQTESSVAEQEAEFQSPKYIFHNFMERLWAYLTIQQLLEQTVSASDADQQALRNQALNLSLAYSFVTPLTSMVVTKPDDQEQSQVAEKPMEGESRNRNVHSGSTFFKYYLQGAKIPKPEASFSPRRGWNRQAGAAGSRMNFRPGVLSSRQLGLPGPPDVPDHAAYHPFRRLAILPASAPPATSNPDPAVSRVMNMKIEETTMTTQTPAPIQAPSAILPLPGQSVERLCVDPRHRQGPVNLLSDPEQGVEVTGQYEREKAGFSWIEVTFKNPLVWVHASPEHVVVTRNRRSSAYKWKETLFSVMPGLKMTMDKTGLLLLSDPDKVTIGLLFWDGRGEGLRLLLRDTDRFSSHVGGTLGQFYQEVLWGSPAASDDGRRTLRVQGNDHSATRERRLDYQEGPPGVEISCWSVEL

SEQ ID NO: 568 - protein, 396 aa, synthetic construct
ASTKGPSVFPLAPCSRSTSESTAALGCLVKDYFPEPVTVSWNSGALTSGVHTFPAVLQSSGLYSLSSVVTVPSSSLGTKTYTCNVDHKPSNTKVDKRVESKYGPPCPSCPAPEFLGGPSVFLFPPKPKDTLMISRTPEVTCVVVDVSQEDPEVQFNWYVDGVEVHNAKTKPREEQFNSTYRVVSVLTVLHQDWLNGKEYKCKVSNKGLPSSIEKTISKAKGQPREPQVYTLPPSQEEMTKNQVSLTCLVKGFYPSDIAVEWESNGQPENNYKTTPPVLDSDGSFFLYSRLTVDKSRWQEGNVFSCSVMHEALHNHYTQKSLSLSLELQLEESCAEAQDGELDGLWTTITIFITLFLLSVCYSATVTFFKVKWIFSSVVDLKQTIVPDYRNMIRQGA

SEQ ID NO: 569 - protein, 391 aa, synthetic construct; identical to SEQ ID NO: 33

SEQ ID NO: 570 - protein, 24 aa, synthetic construct
  CARBOHYD 15: note = N is linked to the N-linked glycan structure Hex(6)HexNAc(5)Fuc(0)NeuAc(3)
  CARBOHYD 15: note = N is linked to the glycan structure Hex(6)HexNAc(5)Fuc(0)NeuAc(2)
QIPLCANLVPVPITNATLDQITGK

SEQ ID NO: 571 - protein, 15 aa, synthetic construct
  CARBOHYD 11: note = N is linked to the glycan structure Hex(6)HexNAc(6)Fuc(1)NeuAc(0)
EYESYSDFERNVTEK

SEQ ID NO: 572 - protein, 27 aa, synthetic construct
  CARBOHYD 18: note = N is linked to the glycan structure Hex(5)HexNAc(5)Fuc(0)NeuAc(2)
  CARBOHYD 18: note = N is linked to the glycan structure Hex(5)HexNAc(5)Fuc(0)NeuAc(1)
LSLHRPALEDLLLGSEANLTCTLTGLR

SEQ ID NO: 573 - protein, 19 aa, synthetic construct
  CARBOHYD 6: note = N is linked to the N-linked glycan structure Hex(5)HexNAc(4)Fuc(1)NeuAc(0)
LQAPLNYTEFQKPICLPSK

SEQ ID NO: 574 - protein, 16 aa, synthetic construct
  CARBOHYD 4: note = N is linked to the N-linked glycan structure Hex(7)HexNAc(6)Fuc(0)NeuAc(2)
  CARBOHYD 4: note = N is linked to the glycan structure  Hex(7)HexNAc(6)F uc(0)NeuAc(3)
YTGNASALFILPDQDK

SEQ ID NO: 575 - protein, 13 aa, synthetic construct
  CARBOHYD 6: note = N is linked to the N-linked glycan structure Hex(5)HexNAc(4)Fuc(1)NeuAc(0)
WNCWSNWSSCSGR

SEQ ID NO: 576 - protein, 15 aa, synthetic construct
  CARBOHYD 12: note = N is linked to the N-linked glycan structure Hex(5)HexNAc(4)Fuc(0)NeuAc(2)
VCQDCPLLAPLNDTR

SEQ ID NO: 577 - protein, 14 aa, synthetic construct
  CARBOHYD 3: note = N is linked to the glycan structure Hex(6)HexNAc(5)Fuc(0)NeuAc(1)
LANLTQGEDQYYLR

SEQ ID NO: 578 - protein, 32 aa, synthetic construct; identical to SEQ ID NO: 84
  CARBOHYD 6: note = N is linked to the glycan structure Hex(5)HexNAc(2)Fuc(0)NeuAc(0)
  CARBOHYD 6: note = N is linked to the glycan structure Hex(6)HexNAc(2)Fuc(0)NeuAc(0)

SEQ ID NO: 579 - protein, 18 aa, synthetic construct
  CARBOHYD 15: note = N is linked to the N-linked glycan structure Hex(5)HexNAc(4)Fuc(0)NeuAc(1)
IPCSQPPQIEHGTINSSR

SEQ ID NO: 580 - protein, 13 aa, synthetic construct
  CARBOHYD 5: note = N is linked to the N-linked glycan structure Hex(5)HexNAc(4)Fuc(0)NeuAc(1)
ISEENETTCYMGK

SEQ ID NO: 581 - protein, 16 aa, synthetic construct
  CARBOHYD 7: note = N is linked to the glycan structure Hex(5)HexNAc(4)Fuc(0)NeuAc(1)
ALPQPQNVTSLLGCTH

SEQ ID NO: 582 - protein, 9 aa, synthetic construct
  CARBOHYD 5: note = N is linked to the glycan structure Hex(4)HexNAc(4)Fuc(1)NeuAc(0)
  CARBOHYD 5: note = N is linked to the glycan structure Hex(4)HexNAc(4)Fuc(1)NeuAc(1)
EEQYNSTFR

SEQ ID NO: 583 - protein, 8 aa, synthetic construct
  CARBOHYD 5: note = N is linked to the N-linked glycan structure Hex(5)HexNAc(4)Fuc(1)NeuAc(0)
  CARBOHYD 5: note = N is linked to the N-linked glycan structure Hex(5)HexNAc(4)Fuc(0)NeuAc(2)
GVNFNVSK

SEQ ID NO: 584 - protein, 13 aa, synthetic construct
  CARBOHYD 12: note = N is linked to the N-linked glycan structure Hex(5)HexNAc(4)Fuc(0)NeuAc(1)
CGLVPVLAENYNK

SEQ ID NO: 585 - protein, 17 aa, synthetic construct
TTPPVLDSDGSFFLYSR

SEQ ID NO: 586 - protein, 21 aa, synthetic construct
TPEVTCVVVDVSHEDPEVQFK

SEQ ID NO: 587 - protein, 24 aa, synthetic construct
  CARBOHYD 6: note = N is linked to the glycan structure Hex(5)HexNAc(5)Fuc(1)NeuAc(1)
  CARBOHYD 6: note = N is linked to the N-linked glycan structure Hex(5)HexNAc(4)Fuc(0)NeuAc(2)
MVSHHNLTTGATLINEQWLLTTAK

SEQ ID NO: 588 - protein, 8 aa, synthetic construct
  CARBOHYD 1: note = N is linked to the N-linked glycan structure Hex(5)HexNAc(4)Fuc(0)NeuAc(1)
  CARBOHYD 1: note = N is linked to the glycan structure Hex(6)HexNAc(3)Fuc(0)NeuAc(1)
NGSLFAFR

SEQ ID NO: 589 - protein, 13 aa, synthetic construct
  CARBOHYD 5: note = N is linked to the N-linked glycan structure Hex(5)HexNAc(4)Fuc(0)NeuAc(1)
  CARBOHYD 9: note = N is linked to the N-linked glycan structure Hex(5)HexNAc(4)Fuc(0)NeuAc(2)
NLFLNHSENATAK

SEQ ID NO: 590 - protein, 16 aa, synthetic construct
  CARBOHYD 6: note = N is linked to the N-linked glycan structure Hex(5)HexNAc(4)Fuc(0)NeuAc(1)
  CARBOHYD 6: note = N is linked to the glycan structure Hex(6)HexNAc(5)Fuc(1)NeuAc(1)
VVLHPNYSQVDIGLIK

SEQ ID NO: 591 - protein, 25 aa, synthetic construct
  CARBOHYD 5: note = N is linked to the N-linked glycan structure Hex(5)HexNAc(4)Fuc(0)NeuAc(1)
LPTQNITFQTESSVAEQEAEFQSPK

SEQ ID NO: 592 - protein, 20 aa, synthetic construct
  CARBOHYD 3: note = N is linked to the N-linked glycan structure Hex(5)HexNAc(4)Fuc(0)NeuAc(1)
TLNQSSDELQLSMGNAMFVK

SEQ ID NO: 593 - protein, 15 aa, synthetic construct
  CARBOHYD 10: note = N is linked to the N-linked glycan structure Hex(5)HexNAc(4)Fuc(0)NeuAc(2)
VTACHSSQPNATLYK

SEQ ID NO: 594 - protein, 9 aa, synthetic construct
  CARBOHYD 5: note = N is linked to the N-linked glycan structure Hex(5)HexNAc(4)Fuc(0)NeuAc(0)
  CARBOHYD 5: note = N is linked to the glycan structure Hex(5)HexNAc(5)Fuc(1)NeuAc(0)
  CARBOHYD 5: note = N is linked to the N-linked glycan structure Hex(5)HexNAc(4)Fuc(1)NeuAc(0)
  CARBOHYD 5: note = N is linked to the glycan structure Hex(4)HexNAc(4)Fuc(0)NeuAc(0)
EEQYNSTYR

SEQ ID NO: 595 - protein, 9 aa, synthetic construct
  CARBOHYD 5: note = N is linked to the N-linked glycan structure Hex(5)HexNAc(4)Fuc(1)NeuAc(1)
  CARBOHYD 5: note = N is linked to the N-linked glycan structure Hex(5)HexNAc(4)Fuc(1)NeuAc(0)
  CARBOHYD 5: note = N is linked to the N-linked glycan structure Hex(4)HexNAc(4)Fuc(1)NeuAc(0)
  CARBOHYD 5: note = N is linked to the glycan structure Hex(5)HexNAc(5)Fuc(1)NeuAc(0)
  CARBOHYD 5: note = N is linked to the N-linked glycan structure Hex(4)HexNAc(5)Fuc(0)NeuAc(0)
  CARBOHYD 5: note = N is linked to the glycan structure Hex(3)HexNAc(3)Fuc(1)NeuAc(0)
EEQFNSTFR

SEQ ID NO: 596 - protein, 500 aa, synthetic construct; identical to SEQ ID NO: 137
  CARBOHYD 238: note = N is linked to the N-linked glycan structure Hex(5)HexNAc(4)Fuc(1)NeuAc(2)
  CARBOHYD 238: note = N is linked to the N-linked glycan structure Hex(5)HexNAc(4)Fuc(0)NeuAc(2)
  CARBOHYD 253: note = N is linked to the glycan structure Hex(6)HexNAc(5)Fuc(1)NeuAc(3)

SEQ ID NO: 597 - protein, 406 aa, synthetic construct; identical to SEQ ID NO: 135
  CARBOHYD 184: note = N is linked to the glycan structure Hex(6)HexNAc(5)Fuc(1)NeuAc(3)
  CARBOHYD 207: note = N is linked to the N-linked glycan structure Hex(5)HexNAc(4)Fuc(0)NeuAc(2) or Hex(6)HexNAc(5)Fuc(0)NeuAc(3)
  CARBOHYD 207: note = N is linked to the glycan structure Hex(6)HexNAc(5)Fuc(0)NeuAc(2) or Hex(6)HexNAc(5)Fuc(0)NeuAc(3)
  CARBOHYD 241: note = N is linked to the N-linked glycan structure Hex(6)HexNAc(5)Fuc(0)NeuAc(3)
  CARBOHYD 241: note = N is linked to the glycan structure Hex(6)HexNAc(5)Fuc(1)NeuAc(3)
  CARBOHYD 241: note = N is linked to the glycan structure Hex(7)HexNAc(6)Fuc(1)Neu(5)Ac(3)
  CARBOHYD 241: note = N is linked to the glycan structure Hex(6)HexNAc(5)Fuc(1)NeuAc(1)
  CARBOHYD 184: note = N is linked to the N-linked glycan structure Hex(5)HexNAc(4)Fuc(0)NeuAc(2)
  CARBOHYD 184: note = N is linked to the glycan structure Hex(6)HexNAc(5)Fuc(0)NeuAc(1)
  CARBOHYD 184: note = N is linked to the glycan structure Hex(6)HexNAc(5)Fuc(0)NeuAc(2)
  CARBOHYD 241: note = N is linked to the glycan structure Hex(6)HexNAc(5)Fuc(1)NeuAc(2)
  CARBOHYD 207: note = N is linked to the glycan structure Hex(6)HexNAc(5)Fuc(1)NeuAc(3)
  CARBOHYD 211: note = N is linked to the glycan structure Hex(6)HexNAc(5)Fuc(0)NeuAc(2)
  CARBOHYD 207: note = N is linked to the N-linked glycan structure Hex(5)HexNAc(4)Fuc(0)NeuAc(1)
  CARBOHYD 241: note = N is linked to the glycan structure Hex(6)HexNAc(5)Fuc(0)NeuAc(0)

SEQ ID NO: 598 - protein, 478 aa, synthetic construct; identical to SEQ ID NO: 69
  CARBOHYD 242: note = N is linked to the glycan structure Hex(6)HexNAc(5)Fuc(0)NeuAc(2)
  CARBOHYD 169: note = N is linked to the glycan structure Hex(6)HexNAc(3)Fuc(0)NeuAc(1)

SEQ ID NO: 599 - protein, 911 aa, synthetic construct
MDGAMGPRGLLLCMYLVSLLILQAMPALGSATGRSKSSEKRQAVDTAVDGVFIRSLKVNCKVTSRFAHYVVTSQVVNTANEAREVAFDLEIPKTAFISDFAVTADGNAFIGDIKDKVTAWKQYRKAAISGENAGLVRASGRTMEQFTIHLTVNPQSKVTFQLTYEEVLKRNHMQYEIVIKVKPKQLVHHFEIDVDIFEPQGISKLDAQASFLPKELAAQTIKKSFSGKKGHVLFRPTVSQQQSCPTCSTSLLNGHFKVTYDVSRDKICDLLVANNHFAHFFAPQNLTNMNKNVVFVIDISGSMRGQKVKQTKEALLKILGDMQPGDYFDLVLFGTRVQSWKGSLVQASEANLQAAQDFVRGFSLDEATNLNGGLLRGIEILNQVQESLPELSNHASILIMLTDGDPTEGVTDRSQILKNVRNAIRGRFPLYNLGFGHNVDFNFLEVMSMENNGRAQRIYEDHDATQQLQGFYSQVAKPLLVDVDLQYPQDAVLALTQNHHKQYYEGSEIVVAGRIADNKQSSFKADVQAHGEGQEFSITCLVDEEEMKKLLRERGHMLENHVERLWAYLTIQELLAKRMKVDREERANLSSQALQMSLDYGFVTPLTSMSIRGMADQDGLKPTIDKPSEDSPPLEMLGPRRTFVLSALQPSPTHSSSNTQRLPDRVTGVDTDPHFIIHVPQKEDTLCFNINEEPGVILSLVQDPNTGFSVNGQLIGNKARSPGQHDGTYFGRLGIANPATDFQLEVTPQNITLNPGFGGPVFSWRDQAVLRQDGVVVTINKKRNLVVSVDDGGTFEVVLHRVWKGSSVHQDFLGFYVLDSHRMSARTHGLLGQFFHPIGFEVSDIHPGSDPTKPDATMVVRNRRLTVTRGLQKDYSKDPWHGAEVSCWFIHNNGAGLIDGAYTDYIVPDIF

SEQ ID NO: 600 - protein, 367 aa, synthetic construct; identical to SEQ ID NO: 38
  CARBOHYD 176: note = N is linked to the glycan structure Hex(6)HexNAc(5)Fuc(1)NeuAc(3)
  CARBOHYD 176: note = N is linked to the glycan structure Hex(6)HexNAc(5)Fuc(0)NeuAc(2)
  CARBOHYD 176: note = N is linked to the glycan structure Hex(6)HexNAc(5)Fuc(0)NeuAc(1)
  CARBOHYD 176: note = N is linked to the N-linked glycan structure Hex(5)HexNAc(4)Fuc(0)NeuAc(2)

SEQ ID NO: 601 - protein, 418 aa, synthetic construct; identical to SEQ ID NO: 24
  CARBOHYD 70: note = N is linked to the N-linked glycan structure Hex(5)HexNAc(4)Fuc(0)NeuAc(2)
  CARBOHYD 271: note = N is linked to the N-linked glycan structure Hex(5)HexNAc(4)Fuc(0)NeuAc(1)
  CARBOHYD 271: note = N is linked to the N-linked glycan structure Hex(5)HexNAc(4)Fuc(0)NeuAc(2)

SEQ ID NO: 602 - protein, 934 aa, synthetic construct; identical to SEQ ID NO: 40

SEQ ID NO: 603 - protein, 453 aa, synthetic construct; identical to SEQ ID NO: 161
  CARBOHYD 46: note = N is linked to the N-linked glycan structure Hex(6)HexNAc(3)Fuc(1)NeuAc(1)
  CARBOHYD 209: note = N is linked to the glycan structure Hex(5)HexNAc(5)Fuc(0)NeuAc(0)
  CARBOHYD 440: note = N is linked to the glycan structure Hex(6)HexNAc(2)Fuc(0)NeuAc(0)

SEQ ID NO: 604 - protein, 188 aa, synthetic construct; identical to SEQ ID NO: 67
  CARBOHYD 135: note = N is linked to the N-linked glycan structure Hex(5)HexNAc(4)Fuc(0)NeuAc(2)

SEQ ID NO: 605 - protein, 500 aa, synthetic construct; identical to SEQ ID NO: 137
  CARBOHYD 238: note = N is linked to the N-linked glycan structure Hex(5)HexNAc(4)Fuc(1)NeuAc(2)
  CARBOHYD 238: note = N is linked to the N-linked glycan structure Hex(5)HexNAc(4)Fuc(0)NeuAc(2)
  CARBOHYD 253: note = N is linked to the glycan structure Hex(6)HexNAc(5)Fuc(1)NeuAc(3)

SEQ ID NO: 606 - protein, 377 aa, synthetic construct; identical to SEQ ID NO: 217

SEQ ID NO: 607 - protein, 418 aa, synthetic construct; identical to SEQ ID NO: 24
  CARBOHYD 70: note = N is linked to the N-linked glycan structure Hex(5)HexNAc(4)Fuc(0)NeuAc(2)
  CARBOHYD 271: note = N is linked to the N-linked glycan structure Hex(5)HexNAc(4)Fuc(0)NeuAc(1)
  CARBOHYD 271: note = N is linked to the N-linked glycan structure Hex(5)HexNAc(4)Fuc(0)NeuAc(2)

SEQ ID NO: 608 - protein, 406 aa, synthetic construct; identical to SEQ ID NO: 135

SEQ ID NO: 609 - protein, 1676 aa, synthetic construct; identical to SEQ ID NO: 132
  CARBOHYD 741: note = N is linked to the N-linked glycan structure Hex(5)HexNAc(4)Fuc(0)NeuAc(1)

SEQ ID NO: 610 - protein, 644 aa, synthetic construct; identical to SEQ ID NO: 180
  CARBOHYD 205: note = N is linked to the glycan structure Hex(6)HexNAc(5)Fuc(1)NeuAc(3)
  CARBOHYD 294: note = N is linked to the N-linked glycan structure Hex(6)HexNAc(5)Fuc(0)NeuAc(3)
  CARBOHYD 209: note = E is linked to the glycan structure Hex(5)HexNAc(5)Fuc(0)NeuAc(0)

SEQ ID NO: 611 - protein, 326 aa, synthetic construct; identical to SEQ ID NO: 157
  CARBOHYD 176: note = N is linked to the N-linked glycan structure  Hex(3)H exNAc(3)Fuc(1)NeuAc(0)
  CARBOHYD 175: note = N is linked to the glycan structure Hex(3)HexNAc(5)Fuc(0)NeuAc(0)
  CARBOHYD 175: note = N is linked to the glycan structure Hex(4)HexNAc(4)Fuc(1)NeuAc(0)
  CARBOHYD 175: note = N is linked to the N-linked glycan structure Hex(5)HexNAc(4)Fuc(1)NeuAc(0)

SEQ ID NO: 612 - protein, 453 aa, synthetic construct; identical to SEQ ID NO: 161
  CARBOHYD 46: note = N is linked to the N-linked glycan structure Hex(6)HexNAc(3)Fuc(1)NeuAc(1)
  CARBOHYD 209: note = N is linked to the glycan structure Hex(5)HexNAc(5)Fuc(0)NeuAc(0)
  CARBOHYD 440: note = N is linked to the glycan structure Hex(6)HexNAc(2)Fuc(0)NeuAc(0)

SEQ ID NO: 613 - protein, 27 aa, synthetic construct
NISDGFDGIPDNVDAALALPAHSYSGR

SEQ ID NO: 614 - protein, 26 aa, synthetic construct
WVLTAAHCLLYPPWDKNFTENDLLVR

SEQ ID NO: 615 - protein, 10 aa, synthetic construct
ADLSGITGAR

SEQ ID NO: 616 - protein, 17 aa, synthetic construct
GVTSVSQIFHSPDLAIR

SEQ ID NO: 617 - protein, 16 aa, synthetic construct
VVLHPNYSQVDIGLIK

SEQ ID NO: 618 - protein, 8 aa, synthetic construct
NGSLFAFR

SEQ ID NO: 619 - protein, 20 aa, synthetic construct
TFVLSALQPSPTHSSSNTQR

SEQ ID NO: 620 - protein, 22 aa, synthetic construct
AALAAFNAQNNGSNFQLEEISR

SEQ ID NO: 621 - protein, 30 aa, synthetic construct; identical to SEQ ID NO: 78

SEQ ID NO: 622 - protein, 11 aa, synthetic construct
IGESIELTCPK

SEQ ID NO: 623 - protein, 11 aa, synthetic construct
YKNNSDISSTR

SEQ ID NO: 624 - protein, 23 aa, synthetic construct
TELFSSSCPGGIMLNETGQGYQR

SEQ ID NO: 625 - protein, 8 aa, synthetic construct
DTFVNASR

SEQ ID NO: 626 - protein, 21 aa, synthetic construct
TPEVTCVVVDVSHEDPEVQFK

SEQ ID NO: 627 - protein, 30 aa, synthetic construct; identical to SEQ ID NO: 78

SEQ ID NO: 628 - protein, 24 aa, synthetic construct
MVSHHNLTTGATLINEQWLLTTAK

SEQ ID NO: 629 - protein, 8 aa, synthetic construct
GIYGTISR

SEQ ID NO: 630 - protein, 12 aa, synthetic construct
ITYSIVQTNCSK

SEQ ID NO: 631 - protein, 9 aa, synthetic construct
EEQFNSTFR

SEQ ID NO: 632 - protein, 21 aa, synthetic construct
GLTFQQNASSMCVPDQDTAIR

SEQ ID NO: 633 - protein, 423 aa, synthetic construct; identical to SEQ ID NO: 26
  CARBOHYD 127: note = N is linked to the N-linked glycan structure Hex(6)HexNAc(5)Fuc(0)NeuAc(3)
  CARBOHYD 271: note = N is linked to the glycan structure Hex(6)HexNAc(5)Fuc(1)NeuAc(3)

SEQ ID NO: 634 - protein, 188 aa, synthetic construct; identical to SEQ ID NO: 67
  CARBOHYD 135: note = N is linked to the N-linked glycan structure Hex(5)HexNAc(4)Fuc(0)NeuAc(2)

SEQ ID NO: 635 - protein, 201 aa, synthetic construct; identical to SEQ ID NO: 27
  CARBOHYD 72: note = N is linked to the N-linked glycan structure Hex(6)HexNAc(5)Fuc(0)NeuAc(3)
  CARBOHYD 103: note = N is linked to the N-linked glycan structure Hex(6)HexNAc(5)Fuc(0)NeuAc(3)
  CARBOHYD 103: note = N is linked to the glycan structure Hex(6)HexNAc(5)Fuc(1)NeuAc(3)
  CARBOHYD 103: note = N is linked to the glycan structure Hex(7)HexNAc(6)Fuc(1)NeuAc(4)
  CARBOHYD 93: note = N is linked to the glycan structure Hex(6)HexNAc(5)Fuc(1)NeuAc(3)
  CARBOHYD 93: note = N is linked to the N-linked glycan structure Hex(7)HexNAc(6)Fuc(0)NeuAc(4)
  CARBOHYD 93: note = N is linked to the glycan structure Hex(7)HexNAc(6)Fuc(1)Neu(5)Ac(3)
  CARBOHYD 93: note = N is linked to the glycan structure Hex(7)HexNAc(6)Fuc(1)NeuAc(4)
  CARBOHYD 93: note = N is linked to the glycan structure  Hex(7)HexNAc(6)F uc(1)Neu(5)Ac(2)

SEQ ID NO: 636 - protein, 500 aa, synthetic construct; identical to SEQ ID NO: 137
  CARBOHYD 238: note = N is linked to the N-linked glycan structure Hex(5)HexNAc(4)Fuc(1)NeuAc(2)
  CARBOHYD 238: note = N is linked to the N-linked glycan structure Hex(5)HexNAc(4)Fuc(0)NeuAc(2)
  CARBOHYD 253: note = N is linked to the glycan structure Hex(6)HexNAc(5)Fuc(1)NeuAc(3)

SEQ ID NO: 637 - protein, 201 aa, synthetic construct; identical to SEQ ID NO: 28
  CARBOHYD 72: note = N is linked to the N-linked glycan structure Hex(6)HexNAc(5)Fuc(0)NeuAc(3)

SEQ ID NO: 638 - protein, 1676 aa, synthetic construct; identical to SEQ ID NO: 132
  CARBOHYD 741: note = N is linked to the N-linked glycan structure Hex(5)HexNAc(4)Fuc(0)NeuAc(1)

SEQ ID NO: 639 - protein, 367 aa, synthetic construct; identical to SEQ ID NO: 38
  CARBOHYD 176: note = N is linked to the glycan structure Hex(6)HexNAc(5)Fuc(1)NeuAc(3)
  CARBOHYD 176: note = N is linked to the glycan structure Hex(6)HexNAc(5)Fuc(0)NeuAc(2)
  CARBOHYD 176: note = N is linked to the glycan structure Hex(6)HexNAc(5)Fuc(0)NeuAc(1)
  CARBOHYD 176: note = N is linked to the N-linked glycan structure Hex(5)HexNAc(4)Fuc(0)NeuAc(2)

SEQ ID NO: 640 - protein, 367 aa, synthetic construct; identical to SEQ ID NO: 38
  CARBOHYD 176: note = N is linked to the glycan structure Hex(6)HexNAc(5)Fuc(1)NeuAc(3)
  CARBOHYD 176: note = N is linked to the glycan structure Hex(6)HexNAc(5)Fuc(0)NeuAc(2)
  CARBOHYD 176: note = N is linked to the glycan structure Hex(6)HexNAc(5)Fuc(0)NeuAc(1)
  CARBOHYD 176: note = N is linked to the N-linked glycan structure Hex(5)HexNAc(4)Fuc(0)NeuAc(2)

SEQ ID NO: 641 - protein, 934 aa, synthetic construct; identical to SEQ ID NO: 40

SEQ ID NO: 642 - protein, 406 aa, synthetic construct; identical to SEQ ID NO: 135
  CARBOHYD 184: note = N is linked to the glycan structure Hex(6)HexNAc(5)Fuc(1)NeuAc(3)
  CARBOHYD 207: note = N is linked to the N-linked glycan structure Hex(5)HexNAc(4)Fuc(0)NeuAc(2) or Hex(6)HexNAc(5)Fuc(0)NeuAc(3)
  CARBOHYD 207: note = N is linked to the glycan structure Hex(6)HexNAc(5)Fuc(0)NeuAc(2) or Hex(6)HexNAc(5)Fuc(0)NeuAc(3)
  CARBOHYD 241: note = N is linked to the N-linked glycan structure Hex(6)HexNAc(5)Fuc(0)NeuAc(3)
  CARBOHYD 241: note = N is linked to the glycan structure Hex(6)HexNAc(5)Fuc(1)NeuAc(3)
  CARBOHYD 241: note = N is linked to the glycan structure Hex(6)HexNAc(5)Fuc(1)NeuAc(1)
  CARBOHYD 184: note = N is linked to the N-linked glycan structure Hex(5)HexNAc(4)Fuc(0)NeuAc(2)
  CARBOHYD 184: note = N is linked to the glycan structure Hex(6)HexNAc(5)Fuc(0)NeuAc(1)
  CARBOHYD 184: note = N is linked to the glycan structure Hex(6)HexNAc(5)Fuc(0)NeuAc(2)
  CARBOHYD 241: note = N is linked to the glycan structure Hex(6)HexNAc(5)Fuc(1)NeuAc(2)
  CARBOHYD 207: note = N is linked to the glycan structure Hex(6)HexNAc(5)Fuc(1)NeuAc(3)
  CARBOHYD 211: note = N is linked to the glycan structure Hex(6)HexNAc(5)Fuc(0)NeuAc(2)
  CARBOHYD 241: note = N is linked to the glycan structure Hex(6)HexNAc(5)Fuc(0)NeuAc(0)
  CARBOHYD 241: note = N is linked to the glycan structure Hex(6)HexNAc(5)Fuc(1)NeuAc(1)
  CARBOHYD 184: note = N is linked to the glycan structure Hex(6)HexNAc(5)Fuc(0)NeuAc(2)

SEQ ID NO: 643 - protein, 4563 aa, synthetic construct; identical to SEQ ID NO: 29
  CARBOHYD 3895: note = N is linked to the N-linked glycan structure Hex(5)HexNAc(4)Fuc(0)NeuAc(1)
  CARBOHYD 3411: note = N is linked to the glycan structure Hex(5)HexNAc(3)Fuc(0)NeuAc(1)
  CARBOHYD 983: note = N is linked to the N-linked glycan structure Hex(5)HexNAc(4)Fuc(0)NeuAc(2)

SEQ ID NO: 644 - protein, 406 aa, synthetic construct; identical to SEQ ID NO: 135
  CARBOHYD 184: note = N is linked to the glycan structure Hex(6)HexNAc(5)Fuc(1)NeuAc(3)
  CARBOHYD 207: note = N is linked to the N-linked glycan structure Hex(5)HexNAc(4)Fuc(0)NeuAc(2) or Hex(6)HexNAc(5)Fuc(0)NeuAc(3)
  CARBOHYD 207: note = N is linked to the glycan structure Hex(6)HexNAc(5)Fuc(0)NeuAc(2) or Hex(6)HexNAc(5)Fuc(0)NeuAc(3)
  CARBOHYD 241: note = N is linked to the N-linked glycan structure Hex(6)HexNAc(5)Fuc(0)NeuAc(3)
  CARBOHYD 241: note = N is linked to the glycan structure Hex(6)HexNAc(5)Fuc(1)NeuAc(3)
  CARBOHYD 241: note = N is linked to the glycan structure Hex(7)HexNAc(6)Fuc(1)Neu(5)Ac(3)
  CARBOHYD 241: note = N is linked to the glycan structure Hex(6)HexNAc(5)Fuc(1)NeuAc(1)
  CARBOHYD 184: note = N is linked to the N-linked glycan structure Hex(5)HexNAc(4)Fuc(0)NeuAc(2)
  CARBOHYD 184: note = N is linked to the glycan structure Hex(6)HexNAc(5)Fuc(0)NeuAc(1)
  CARBOHYD 184: note = N is linked to the glycan structure Hex(6)HexNAc(5)Fuc(0)NeuAc(2)
  CARBOHYD 241: note = N is linked to the glycan structure Hex(6)HexNAc(5)Fuc(1)NeuAc(2)
  CARBOHYD 207: note = N is linked to the glycan structure Hex(6)HexNAc(5)Fuc(1)NeuAc(3)
  CARBOHYD 211: note = N is linked to the glycan structure Hex(6)HexNAc(5)Fuc(0)NeuAc(2)
  CARBOHYD 207: note = N is linked to the N-linked glycan structure Hex(5)HexNAc(4)Fuc(0)NeuAc(1)
  CARBOHYD 241: note = N is linked to the glycan structure Hex(6)HexNAc(5)Fuc(0)NeuAc(0)
  CARBOHYD 241: note = N is linked to the glycan structure Hex(6)HexNAc(5)Fuc(1)NeuAc(1)
  CARBOHYD 184: note = N is linked to the glycan structure Hex(6)HexNAc(5)Fuc(0)NeuAc(2)

SEQ ID NO: 645 - protein, 406 aa, synthetic construct; identical to SEQ ID NO: 135
  CARBOHYD 184: note = N is linked to the glycan structure Hex(6)HexNAc(5)Fuc(1)NeuAc(3)
  CARBOHYD 207: note = N is linked to the N-linked glycan structure Hex(5)HexNAc(4)Fuc(0)NeuAc(2) or Hex(6)HexNAc(5)Fuc(0)NeuAc(3)
  CARBOHYD 207: note = N is linked to the glycan structure Hex(6)HexNAc(5)Fuc(0)NeuAc(2) or Hex(6)HexNAc(5)Fuc(0)NeuAc(3)
  CARBOHYD 241: note = N is linked to the N-linked glycan structure Hex(6)HexNAc(5)Fuc(0)NeuAc(3)
  CARBOHYD 241: note = N is linked to the glycan structure Hex(6)HexNAc(5)Fuc(1)NeuAc(3)
  CARBOHYD 241: note = N is linked to the glycan structure Hex(6)HexNAc(5)Fuc(1)NeuAc(1)
  CARBOHYD 184: note = N is linked to the N-linked glycan structure Hex(5)HexNAc(4)Fuc(0)NeuAc(2)
  CARBOHYD 184: note = N is linked to the glycan structure Hex(6)HexNAc(5)Fuc(0)NeuAc(1)
  CARBOHYD 184: note = N is linked to the glycan structure Hex(6)HexNAc(5)Fuc(0)NeuAc(2)
  CARBOHYD 241: note = N is linked to the glycan structure Hex(6)HexNAc(5)Fuc(1)NeuAc(2)
  CARBOHYD 207: note = N is linked to the glycan structure Hex(6)HexNAc(5)Fuc(1)NeuAc(3)
  CARBOHYD 211: note = N is linked to the glycan structure Hex(6)HexNAc(5)Fuc(0)NeuAc(2)
  CARBOHYD 207: note = N is linked to the N-linked glycan structure
  CARBOHYD 241: note = N is linked to the glycan structure Hex(6)HexNAc(5)Fuc(0)NeuAc(0)
  CARBOHYD 271: note = N is linked to the N-linked glycan structure Hex(5)HexNAc(4)Fuc(0)NeuAc(2)

SEQ ID NO: 646 - protein, 418 aa, synthetic construct; identical to SEQ ID NO: 24
  CARBOHYD 70: note = N is linked to the N-linked glycan structure Hex(5)HexNAc(4)Fuc(0)NeuAc(2)
  CARBOHYD 271: note = N is linked to the N-linked glycan structure Hex(5)HexNAc(4)Fuc(0)NeuAc(1)

SEQ ID NO: 647 - protein, 453 aa, synthetic construct; identical to SEQ ID NO: 161
  CARBOHYD 46: note = N is linked to the N-linked glycan structure Hex(6)HexNAc(3)Fuc(1)NeuAc(1)
  CARBOHYD 209: note = N is linked to the glycan structure Hex(5)HexNAc(5)Fuc(0)NeuAc(0)
  CARBOHYD 440: note = N is linked to the glycan structure Hex(6)HexNAc(2)Fuc(0)NeuAc(0)

SEQ ID NO: 648 - protein, 500 aa, synthetic construct; identical to SEQ ID NO: 137
  CARBOHYD 238: note = N is linked to the N-linked glycan structure Hex(5)HexNAc(4)Fuc(1)NeuAc(2)
  CARBOHYD 238: note = N is linked to the N-linked glycan structure Hex(5)HexNAc(4)Fuc(0)NeuAc(2)
  CARBOHYD 253: note = N is linked to the glycan structure Hex(6)HexNAc(5)Fuc(1)NeuAc(3)

SEQ ID NO: 649 - protein, 345 aa, synthetic construct; identical to SEQ ID NO: 128
  CARBOHYD 162: note = N is linked to the N-linked glycan structure Hex(6)HexNAc(5)Fuc(0)NeuAc(3)
  CARBOHYD 162: note = N is linked to the N-linked glycan structure Hex(5)HexNAc(4)Fuc(1)NeuAc(2)

SEQ ID NO: 650 - protein, 367 aa, synthetic construct; identical to SEQ ID NO: 38
  CARBOHYD 176: note = N is linked to the glycan structure Hex(6)HexNAc(5)Fuc(1)NeuAc(3)
  CARBOHYD 176: note = N is linked to the glycan structure Hex(6)HexNAc(5)Fuc(0)NeuAc(2)
  CARBOHYD 176: note = N is linked to the glycan structure Hex(6)HexNAc(5)Fuc(0)NeuAc(1)
  CARBOHYD 176: note = N is linked to the N-linked glycan structure Hex(5)HexNAc(4)Fuc(0)NeuAc(2)

SEQ ID NO: 651 - protein, 638 aa, synthetic construct; identical to SEQ ID NO: 36
  CARBOHYD 494: note = N is linked to the N-linked glycan structure Hex(5)HexNAc(4)Fuc(1)NeuAc(0)
  CARBOHYD 127: note = N is linked to the N-linked glycan structure Hex(5)HexNAc(4)Fuc(0)NeuAc(2)
  CARBOHYD 494: note = N is linked to the N-linked glycan structure Hex(6)HexNAc(5)Fuc(0)NeuAc(3)

SEQ ID NO: 652 - protein, 478 aa, synthetic construct; identical to SEQ ID NO: 69
  CARBOHYD 242: note = N is linked to the glycan structure Hex(6)HexNAc(5)Fuc(0)NeuAc(2)
  CARBOHYD 169: note = N is linked to the glycan structure Hex(6)HexNAc(3)Fuc(0)NeuAc(1)

SEQ ID NO: 653 - protein, 10 aa, synthetic construct
ADLSGITGAR

SEQ ID NO: 654 - protein, 23 aa, synthetic construct
TELFSSSCPGGIMLNETGQGYQR

SEQ ID NO: 655 - protein, 15 aa, synthetic construct
YVGGQEHFAHLLILR

SEQ ID NO: 656 - protein, 8 aa, synthetic construct
DTFVNASR

SEQ ID NO: 657 - protein, 8 aa, synthetic construct
TEDTIFLR

SEQ ID NO: 658 - protein, 8 aa, synthetic construct
GIYGTISR

SEQ ID NO: 659 - protein, 22 aa, synthetic construct
AALAAFNAQNNGSNFQLEEISR

SEQ ID NO: 660 - protein, 22 aa, synthetic construct
AALAAFNAQNNGSNFQLEEISR

SEQ ID NO: 661 - protein, 11 aa, synthetic construct
IGESIELTCPK

SEQ ID NO: 662 - protein, 16 aa, synthetic construct
VVLHPNYSQVDIGLIK

SEQ ID NO: 663 - protein, 17 aa, synthetic construct
FEVDSPVYNATWSASLK

SEQ ID NO: 664 - protein, 9 aa, synthetic construct
ILGGHLDAK

SEQ ID NO: 665 - protein, 24 aa, synthetic construct
MVSHHNLTTGATLINEQWLLTTAK

SEQ ID NO: 666 - protein, 30 aa, synthetic construct; identical to SEQ ID NO: 78

SEQ ID NO: 667 - protein, 22 aa, synthetic construct
STGKPTLYNVSLVMSDTAGTCY

SEQ ID NO: 668 - protein, 17 aa, synthetic construct
GVTSVSQIFHSPDLAIR

SEQ ID NO: 669 - protein, 13 aa, synthetic construct
VYKPSAGNNSLYR

SEQ ID NO: 670 - protein, 22 aa, synthetic construct
AALAAFNAQNNGSNFQLEEISR

SEQ ID NO: 671 - protein, 8 aa, synthetic construct
GVNFNVSK

SEQ ID NO: 672 - protein, 8 aa, synthetic construct
NGSLFAFR

SEQ ID NO: 673 - protein, 10 aa, synthetic construct
DLLLPQPDLR

SEQ ID NO: 674 - protein, 13 aa, synthetic construct
SLDFTELDVAAEK

SEQ ID NO: 675 - protein, 30 aa, synthetic construct; identical to SEQ ID NO: 78
  CARBOHYD 1: note = Q is linked to the N-linked glycan structure Hex(5)HexNAc(4)Fuc(1)NeuAc(2)
  CARBOHYD 7: note = N is linked to the N-linked glycan structure Hex(5)HexNAc(4)Fuc(0)NeuAc(2)

SEQ ID NO: 676 - protein, 24 aa, synthetic construct
  CARBOHYD 6: note = N is linked to the N-linked glycan structure Hex(5)HexNAc(4)Fuc(0)NeuAc(2)
  CARBOHYD 1: note = M is linked to the N-linked glycan structure Hex(5)HexNAc(4)Fuc(1)NeuAc(2)
MVSHHNLTTGATLINEQWLLTTAK

SEQ ID NO: 677 - protein, 16 aa, synthetic construct
  CARBOHYD 6: note = N is linked to the glycan structure Hex(6)HexNAc(5)Fuc(1)NeuAc(1)
  CARBOHYD 3: note = L is linked to the glycan structure Hex(6)HexNAc(5)Fuc(1)NeuAc(3)
VVLHPNYSQVDIGLIK

SEQ ID NO: 678 - protein, 13 aa, synthetic construct
  CARBOHYD 2: note = W is linked to the N-linked glycan Hex(5)HexNAc(4)Fuc(1)NeuAc(2)
SWPAVGNCSSALR

SEQ ID NO: 679 - protein, 8 aa, synthetic construct
  CARBOHYD 1: note = V is linked to the O-linked glycan structure Hex(1)HexNAc(1)Fuc(0)NeuAc(2)
VATTVISK

SEQ ID NO: 680 - protein, 24 aa, synthetic construct
  CARBOHYD 6: note = N is linked to the N-linked glycan structure Hex(5)HexNAc(4)Fuc(0)NeuAc(2)
  CARBOHYD 1: note = M is linked to the glycan structure Hex(6)HexNAc(5)Fuc(1)NeuAc(3)
MVSHHNLTTGATLINEQWLLTTAK

SEQ ID NO: 681 - protein, 19 aa, synthetic construct
FSEFWDLDPEVRPTSAVAA

SEQ ID NO: 682 - protein, 21 aa, synthetic construct
  CARBOHYD 7: note = N is linked to the glycan structure Hex(5)HexNAc(5)Fuc(0)NeuAc(0)
  CARBOHYD 2: note = L is linked to the glycan structure Hex(5)HexNAc(5)Fuc(0)NeuAc(0)
GLTFQQNASSMCVPDQDTAIR

SEQ ID NO: 683 - protein, 15 aa, synthetic construct
  CARBOHYD 1: note = V is linked to the N-linked glycan structure Hex(5)HexNAc(4)Fuc(1)NeuAc(2)
VCQDCPLLAPLNDTR

SEQ ID NO: 684 - protein, 10 aa, synthetic construct
VNHVTLSQPK

SEQ ID NO: 685 - protein, 19 aa, synthetic construct
  CARBOHYD 3: note = S is linked to the N-linked glycan structure Hex(5)HexNAc(4)Fuc(1)NeuAc(2)
VLSNNSDANLELINTWVAK

SEQ ID NO: 686 - protein, 16 aa, synthetic construct
  CARBOHYD 1: note = E is linked to the N-linked glycan structure Hex(5)HexNAc(4)Fuc(1)NeuAc(2)
EHEGAIYPDNTTDFQR

SEQ ID NO: 687 - protein, 21 aa, synthetic construct
  CARBOHYD 2: note = L is linked to the glycan structure Hex(5)HexNAc(5)Fuc(0)NeuAc(1)
  CARBOHYD 7: note = N is linked to the glycan structure Hex(5)HexNAc(5)Fuc(0)NeuAc(0)
GLTFQQNASSMCVPDQDTAIR

SEQ ID NO: 688 - protein, 26 aa, synthetic construct
  CARBOHYD 3: note = L is linked to the N-linked glycan structure Hex(5)HexNAc(4)Fuc(0)NeuAc(2)
  CARBOHYD 17: note = N is linked to the N-linked glycan structure Hex(5)HexNAc(4)Fuc(0)NeuAc(2)
WVLTAAHCLLYPPWDKNFTENDLLVR

SEQ ID NO: 689 - protein, 21 aa, synthetic construct
  CARBOHYD 2: note = Q is linked to the N-linked glycan structure Hex(5)HexNAc(4)Fuc(1)NeuAc(2)
QQQHLFGSNVTDCSGNFCLFR

SEQ ID NO: 690 - protein, 22 aa, synthetic construct
  CARBOHYD 2: note = A is linked to the glycan structure Hex(6)HexNAc(5)Fuc(0)NeuAc(1)
AALAAFNAQNNGSNFQLEEISR

SEQ ID NO: 691 - protein, 6 aa, synthetic construct
  CARBOHYD 1: note = A is linked to the N-linked glycan structure Hex(5)HexNAc(4)Fuc(1)NeuAc(2)
ANISHK

SEQ ID NO: 692 - protein, 22 aa, synthetic construct
  CARBOHYD 2: note = A is linked to the N-linked glycan structurHex(5)HexNAc(4)Fuc(1)NeuAc(2)
  CARBOHYD 11: note = N is linked to the glycan structure Hex(6)HexNAc(5)Fuc(0)NeuAc(2)
AALAAFNAQNNGSNFQLEEISR

SEQ ID NO: 693 - protein, 13 aa, synthetic construct
  CARBOHYD 3: note = E is linked to the N-linked glycan structureHex(5)HexNAc(4)Fuc(0)NeuAc(1)
ISEENETTCYMGK

SEQ ID NO: 694 - protein, 9 aa, synthetic construct
  CARBOHYD 1: note = E is linked to the glycan structure Hex(4)HexNAc(5)Fuc(1)NeuAc(1)
EEQYNSTYR

SEQ ID NO: 695 - protein, 33 aa, synthetic construct; identical to SEQ ID NO: 81
  CARBOHYD 2: note = N is linked to the glycan structure Hex(5)HexNAc(2)Fuc(0)NeuAc(0)

SEQ ID NO: 696 - protein, 16 aa, synthetic construct
  CARBOHYD 1: note = E is linked to the N-linked glycan structure Hex(5)HexNAc(4)Fuc(0)NeuAc(2)
EHEGAIYPDNTTDFQR

SEQ ID NO: 697 - protein, 9 aa, synthetic construct
  CARBOHYD 1: note = T is linked to the glycan structure Hex(4)HexNAc(5)Fuc(1)NeuAc(0)
TPLTANITK

SEQ ID NO: 698 - protein, 19 aa, synthetic construct
  CARBOHYD 1: note = V is linked to the N-linked glycan structure Hex(5)HexNAc(4)Fuc(0)NeuAc(2)
VIDFNCTTSSVSSALANTK

SEQ ID NO: 699 - protein, 13 aa, synthetic construct
  CARBOHYD 2: note = L is linked to the glycan structure Hex(12)HexNAc(10)Fuc(0)NeuAc(5)
NLFLNHSENATAK

SEQ ID NO: 700 - protein, 20 aa, synthetic construct
  CARBOHYD 1: note = F is linked to the N-linked glycan structure Hex(7)HexNAc(6)Fuc(0)NeuAc(4)
FNLTETSEAEIHQSFQHLLR

SEQ ID NO: 701 - protein, 20 aa, synthetic construct
  CARBOHYD 3: note = L is linked to the N-linked glycan structure Hex(6)HexNAc(5)Fuc(0)NeuAc(3)
ENLTAPGSDSAVFFEQGTTR

SEQ ID NO: 702 - protein, 13 aa, synthetic construct
  CARBOHYD 2: note = L is linked to the glycan structure Hex(5)HexNAc(4)Fuc(0)NeuAc(2)and Hex(6)HexNAc(5)Fuc(0)NeuAc(2)
NLFLNHSENATAK

SEQ ID NO: 703 - skipped

SEQ ID NO: 704 - protein, 347 aa, Homo sapiens; identical to SEQ ID NO: 144

SEQ ID NO: 705 - protein, 485 aa, Homo sapiens; identical to SEQ ID NO: 182

SEQ ID NO: 706 - protein, 406 aa, Homo sapiens; identical to SEQ ID NO: 135

SEQ ID NO: 707 - protein, 462 aa, Homo sapiens; identical to SEQ ID NO: 39

SEQ ID NO: 708 - protein, 500 aa, Homo sapiens; identical to SEQ ID NO: 137

SEQ ID NO: 709 - protein, 406 aa, Homo sapiens; identical to SEQ ID NO: 135

SEQ ID NO: 710 - protein, 99 aa, Homo sapiens; identical to SEQ ID NO: 30

SEQ ID NO: 711 - protein, 474 aa, Homo sapiens; identical to SEQ ID NO: 142

SEQ ID NO: 712 - protein, 367 aa, Homo sapiens; identical to SEQ ID NO: 38

SEQ ID NO: 713 - protein, 119 aa, Homo sapiens; identical to SEQ ID NO: 147

SEQ ID NO: 714 - protein, 500 aa, Homo sapiens; identical to SEQ ID NO: 137

SEQ ID NO: 715 - protein, 1065 aa, Homo sapiens; identical to SEQ ID NO: 131

SEQ ID NO: 716 - protein, 474 aa, Homo sapiens; identical to SEQ ID NO: 142

SEQ ID NO: 717 - protein, 622 aa, Homo sapiens; identical to SEQ ID NO: 41

SEQ ID NO: 718 - protein, 698 aa, Homo sapiens; identical to SEQ ID NO: 76

SEQ ID NO: 719 - protein, 367 aa, Homo sapiens; identical to SEQ ID NO: 38

SEQ ID NO: 720 - protein, 1676 aa, Homo sapiens; identical to SEQ ID NO: 132

SEQ ID NO: 721 - protein, 367 aa, Homo sapiens; identical to SEQ ID NO: 38

SEQ ID NO: 722 - protein, 1231 aa, Homo sapiens; identical to SEQ ID NO: 42

SEQ ID NO: 723 - protein, 399 aa, Homo sapiens; identical to SEQ ID NO: 34

SEQ ID NO: 724 - protein, 1474 aa, Homo sapiens; identical to SEQ ID NO: 25

SEQ ID NO: 725 - protein, 1065 aa, Homo sapiens; identical to SEQ ID NO: 131

SEQ ID NO: 726 - protein, 391 aa, Homo sapiens; identical to SEQ ID NO: 33

SEQ ID NO: 727 - protein, 525 aa, Homo sapiens; identical to SEQ ID NO: 31

SEQ ID NO: 728 - protein, 406 aa, Homo sapiens; identical to SEQ ID NO: 135

SEQ ID NO: 729 - protein, 423 aa, Homo sapiens; identical to SEQ ID NO: 26

SEQ ID NO: 730 - protein, 406 aa, Homo sapiens; identical to SEQ ID NO: 135

SEQ ID NO: 731 - protein, 21 aa, synthetic construct
  CARBOHYD 9: note = N is linked to the glycan structure Hex(6)HexNAc(5)Fuc(1)NeuAc(3)
QQQHLFGSNVTDCSGNFCLFR

SEQ ID NO: 732 - protein, 15 aa, synthetic construct
  CARBOHYD 7: note = N is linked to the N-linked glycan structure Hex(6)HexNAc(5)Fuc(0)NeuAc(3)
QDQCIYNTTYLNVQR

SEQ ID NO: 733 - protein, 9 aa, synthetic construct
  CARBOHYD 5: note = N is linked to the glycan structure Hex(5)HexNAc(5)Fuc(1)NeuAc(0)
  CARBOHYD 5: note = N is linked to the glycan structure Hex(3)HexNAc(3)Fuc(1)NeuAc(0)
EEQFNSTFR

SEQ ID NO: 734 - protein, 9 aa, synthetic construct
  CARBOHYD 5: note = N is linked to the N-linked glycan structure Hex(5)HexNAc(4)Fuc(1)NeuAc(0)
EEQYNSTYR

SEQ ID NO: 735 - protein, 16 aa, synthetic construct
  CARBOHYD 4: note = N is linked to the glycan structure Hex(6)HexNAc(5)Fuc(0)NeuAc(2)
YTGNASALFILPDQDK

SEQ ID NO: 736 - protein, 7 aa, synthetic construct
  CARBOHYD 2: note = N is linked to the N-linked glycan structure Hex(6)HexNAc(5)Fuc(0)NeuAc(3)
ENGTISR

SEQ ID NO: 737 - protein, 9 aa, synthetic construct
  CARBOHYD 5: note = N is linked to the glycan structure Hex(3)HexNAc(4)Fuc(1)NeuAc(0)
EEQYNSTYR

SEQ ID NO: 738 - protein, 9 aa, synthetic construct
  CARBOHYD 5: note = N is linked to the glycan structure Hex(5)HexNAc(5)Fuc(1)NeuAc(0)
EEQYNSTYR

SEQ ID NO: 739 - protein, 23 aa, synthetic construct
  CARBOHYD 2: note = N is linked to the N-linked glycan structure Hex(6)HexNAc(5)Fuc(0)NeuAc(3)
NNATVHEQVGGPSLTSDLQAQSK

SEQ ID NO: 740 - protein, 16 aa, synthetic construct
  CARBOHYD 6: note = N is linked to the glycan structure Hex(6)HexNAc(5)Fuc(1)NeuAc(1)
  CARBOHYD 6: note = N is linked to the glycan structure Hex(6)HexNAc(5)Fuc(1)NeuAc(3)
VVLHPNYSQVDIGLIK

SEQ ID NO: 741 - protein, 17 aa, synthetic construct
  CARBOHYD 9: note = N is linked to the glycan structure Hex(6)HexNAc(5)Fuc(2)NeuAc(3)
ELHHLQEQNVSNAFLDK

SEQ ID NO: 742 - protein, 14 aa, synthetic construct
  CARBOHYD 6: note = N is linked to the N-linked glycan structure Hex(5)HexNAc(4)Fuc(1)NeuAc(2)
HSHNNNSSDLHPHK

SEQ ID NO: 743 - protein, 13 aa, synthetic construct
  CARBOHYD 5: note = N is linked to the N-linked glycan structure Hex(5)HexNAc(4)Fuc(0)NeuAc(1)
NLFLNHSENATAK

SEQ ID NO: 744 - protein, 15 aa, synthetic construct
  CARBOHYD 7: note = N is linked to the glycan structure Hex(8)HexNAc(7)Fuc(0)NeuAc(4)
QDQCIYNTTYLNVQR

SEQ ID NO: 745 - protein, 19 aa, synthetic construct
  CARBOHYD 5: note = N is linked to the N-linked glycan structure Hex(5)HexNAc(4)Fuc(0)NeuAc(2)
VIDFNCTTSSVSSALANTK

SEQ ID NO: 746 - protein, 16 aa, synthetic construct
  CARBOHYD 4: note = N is linked to the N-linked glycan structure Hex(5)HexNAc(4)Fuc(0)NeuAc(1)
YLGNATAIFFLPDEGK

SEQ ID NO: 747 - protein, 12 aa, synthetic construct
  CARBOHYD 9: note = N is linked to the N-linked glycan structure Hex(5)HexNAc(4)Fuc(1)NeuAc(2)
  CARBOHYD 9: note = N is linked to the N-linked glycan structure Hex(5)HexNAc(4)Fuc(0)NeuAc(2)
ITYSIVQTNCSK

SEQ ID NO: 748 - protein, 13 aa, synthetic construct
  CARBOHYD 12: note = N is linked to the N-linked glycan structure Hex(5)HexNAc(4)Fuc(0)NeuAc(1)
CGLVPVLAENYNK

SEQ ID NO: 749 - protein, 9 aa, synthetic construct
  CARBOHYD 5: note = N is linked to the N-linked glycan structure Hex(5)HexNAc(4)Fuc(1)NeuAc(0)
  CARBOHYD 5: note = N is linked to the glycan structure Hex(3)HexNAc(3)Fuc(1)NeuAc(0)
EEQFNSTFR

SEQ ID NO: 750 - protein, 21 aa, synthetic construct
  CARBOHYD 9: note = N is linked to the N-linked glycan structure Hex(5)HexNAc(4)Fuc(0)NeuAc(0)
QQQHLFGSNVTDCSGNFCLFR

SEQ ID NO: 751 - protein, 15 aa, synthetic construct
  CARBOHYD 7: note = N is linked to the glycan structure Hex(7)HexNAc(6)Fuc(0)NeuAc(3)
QDQCIYNTTYLNVQR

SEQ ID NO: 752 - protein, 17 aa, synthetic construct
  CARBOHYD 9: note = N is linked to the glycan structure Hex(6)HexNAc(5)Fuc(1)NeuAc(2)
ELHHLQEQNVSNAFLDK

SEQ ID NO: 753 - protein, 32 aa, synthetic construct; identical to SEQ ID NO: 48
  CARBOHYD 14: note = N is linked to the glycan structure Hex(6)HexNAc(5)Fuc(0)NeuAc(2)

SEQ ID NO: 754 - protein, 19 aa, synthetic construct
  CARBOHYD 6: note = N is linked to the N-linked glycan structure Hex(5)HexNAc(4)Fuc(0)NeuAc(0)
LQAPLNYTEFQKPICLPSK

SEQ ID NO: 755 - protein, 9 aa, synthetic construct
  CARBOHYD 5: note = N is linked to the N-linked glycan structure Hex(5)HexNAc(4)Fuc(1)NeuAc(1)
EEQYNSTYR

SEQ ID NO: 756 - protein, 13 aa, synthetic construct
  CARBOHYD 5: note = N is linked to the glycan structure Hex(12)HexNAc(10)Fuc(0)NeuAc(5)
  CARBOHYD 9: note = N is linked to the glycan structure Hex(12)HexNAc(10)Fuc(0)NeuAc(5)
NLFLNHSENATAK

SEQ ID NO: 757 - protein, 22 aa, synthetic construct
  CARBOHYD 11: note = N is linked to the glycan structure Hex(6)HexNAc(5)Fuc(1)NeuAc(3)
  CARBOHYD 11: note = N is linked to the glycan structure Hex(6)HexNAc(5)Fuc(0)NeuAc(2)
  CARBOHYD 11: note = N is linked to the glycan structure Hex(6)HexNAc(5)Fuc(0)NeuAc(1)
  CARBOHYD 11: note = N is linked to the N-linked glycan structure Hex(5)HexNAc(4)Fuc(1)NeuAc(2)
AALAAFNAQNNGSNFQLEEISR

SEQ ID NO: 758 - protein, 16 aa, synthetic construct
  CARBOHYD 6: note = N is linked to the glycan structure Hex(6)HexNAc(5)Fuc(1)NeuAc(1)
  CARBOHYD 6: note = N is linked to the N-linked glycan structure Hex(5)HexNAc(4)Fuc(1)NeuAc(2)
VVLHPNYSQVDIGLIK

SEQ ID NO: 759 - protein, 18 aa, synthetic construct
  CARBOHYD 15: note = N is linked to the N-linked glycan structure Hex(5)HexNAc(4)Fuc(0)NeuAc(1)
IPCSQPPQIEHGTINSSR

SEQ ID NO: 760 - protein, 15 aa, synthetic construct
  CARBOHYD 7: note = N is linked to the glycan structure Hex(6)HexNAc(5)Fuc(0)NeuAc(2)
QDQCIYNTTYLNVQR

SEQ ID NO: 761 - protein, 21 aa, synthetic construct
  CARBOHYD 9: note = N is linked to the N-linked glycan structure Hex(5)HexNAc(4)Fuc(1)NeuAc(2)
VGQLQLSHNLSLVILVPQNLK

SEQ ID NO: 762 - protein, 13 aa, synthetic construct
SWPAVGNCSSALR

SEQ ID NO: 763 - protein, 21 aa, synthetic construct
  CARBOHYD 6: note = N is linked to the N-linked glycan structure Hex(5)HexNAc(4)Fuc(0)NeuAc(1)
IVGGTNSSWGEWPWQVSLQVK

SEQ ID NO: 764 - protein, 11 aa, synthetic construct
  CARBOHYD 2: note = N is linked to the N-linked glycan structure Hex(5)HexNAc(4)Fuc(1)NeuAc(2)
ENISDPTSPLR

SEQ ID NO: 765 - protein, 24 aa, synthetic construct
  CARBOHYD 15: note = N is linked to the glycan structure Hex(7)HexNAc(6)Fuc(1)NeuAc(4)
SVQEIQATFFYFTPNKTEDTIFLR

SEQ ID NO: 766 - protein, 21 aa, synthetic construct
  CARBOHYD 9: note = N is linked to the N-linked glycan structure Hex(5)HexNAc(4)Fuc(0)NeuAc(1)
QQQHLFGSNVTDCSGNFCLFR

SEQ ID NO: 767 - protein, 21 aa, synthetic construct
  CARBOHYD 9: note = N is linked to the N-linked glycan structure Hex(5)HexNAc(4)Fuc(1)NeuAc(1)
QQQHLFGSNVTDCSGNFCLFR

SEQ ID NO: 768 - protein, 21 aa, synthetic construct
  CARBOHYD 7: note = N is linked to the glycan structure Hex(5)HexNAc(5)Fuc(1)NeuAc(2)
  CARBOHYD 7: note = N is linked to the glycan structure Hex(5)HexNAc(5)Fuc(0)NeuAc(0)
GLTFQQNASSMCVPDQDTAIR

SEQ ID NO: 769 - protein, 43 aa, synthetic construct
FSVATQTCQITPAEGPVVTAQYDCLGCVHPISTQSPDLEPILR

SEQ ID NO: 770 - protein, 13 aa, synthetic construct
  CARBOHYD 7: note = N is linked to the N-linked glycan structure Hex(5)HexNAc(4)Fuc(0)NeuAc(2)
LQNNENNISCVER

SEQ ID NO: 771 - protein, 9 aa, synthetic construct
  CARBOHYD 5: note = N is linked to the N-linked glycan structure Hex(4)HexNAc(5)Fuc(0)NeuAc(0)
EEQYNSTYR

SEQ ID NO: 772 - protein, 15 aa, synthetic construct
  CARBOHYD 7: note = N is linked to the glycan structure Hex(7)HexNAc(6)Fuc(1)Neu(5)Ac(2)
QDQCIYNTTYLNVQR

SEQ ID NO: 773 - protein, 16 aa, synthetic construct
  CARBOHYD 4: note = N is linked to the N-linked glycan structure Hex(5)HexNAc(4)Fuc(0)NeuAc(2)
YLGNATAIFFLPDEGK

SEQ ID NO: 774 - protein, 16 aa, synthetic construct
  CARBOHYD 4: note = N is linked to the N-linked glycan structure Hex(6)HexNAc(5)Fuc(0)NeuAc(3)
YLGNATAIFFLPDEGK

SEQ ID NO: 775 - protein, 12 aa, synthetic construct
  CARBOHYD 6: note = N is linked to the N-linked glycan structure Hex(5)HexNAc(4)Fuc(1)NeuAc(2)
LNAENNATFYFK

SEQ ID NO: 776 - protein, 14 aa, synthetic construct
  CARBOHYD 11: note = N is linked to the glycan structure Hex(6)HexNAc(2)Fuc(0)NeuAc(0)
QSVPAHFVALNGSK

SEQ ID NO: 777 - protein, 14 aa, synthetic construct
  CARBOHYD 1: note = S is linked to the O-linked glycan structure Hex(2)HexNAc(2)Fuc(0)NeuAc(2)
SSTTKPPFKPHGSR

SEQ ID NO: 778 - protein, 22 aa, synthetic construct
  CARBOHYD 16: note = N is linked to the N-linked glycan structure Hex(5)HexNAc(4)Fuc(1)NeuAc(2)
ADGTVNQIEGEATPVNLTEPAK

SEQ ID NO: 779 - protein, 10 aa, synthetic construct
  CARBOHYD 6: note = N is linked to the N-linked glycan structure Hex(5)HexNAc(4)Fuc(0)NeuAc(2)
DIENFNSTQK

SEQ ID NO: 780 - protein, 698 aa, Homo sapiens; identical to SEQ ID NO: 76

SEQ ID NO: 781 - protein, 201 aa, Homo sapiens; identical to SEQ ID NO: 27

SEQ ID NO: 782 - protein, 395 aa, Homo sapiens; identical to SEQ ID NO: 35
  CARBOHYD 297: note = Q is linked to the N-linked glycan structure Hex(4)HexNAc(4)Fuc(1)NeuAc(0)
  CARBOHYD 297: note = Q is linked to the N-linked glycan structure Hex(4)HexNAc(5)Fuc(0)NeuAc(0)
  CARBOHYD 297: note = Q is linked to the N-linked glycan structure Hex(5)HexNAc(4)Fuc(1)NeuAc(0)
  CARBOHYD 297: note = Q is linked to the N-linked glycan structure Hex(5)HexNAc(4)Fuc(1)NeuAc(1)
  CARBOHYD 297: note = Q is linked to the N-linked glycan structure Hex(5)HexNAc(5)Fuc(1)NeuAc(0)

SEQ ID NO: 783 - protein, 399 aa, Homo sapiens; identical to SEQ ID NO: 34

SEQ ID NO: 784 - protein, 423 aa, Homo sapiens; identical to SEQ ID NO: 26

SEQ ID NO: 785 - protein, 201 aa, Homo sapiens; identical to SEQ ID NO: 27

SEQ ID NO: 786 - protein, 399 aa, Homo sapiens; identical to SEQ ID NO: 34

SEQ ID NO: 787 - protein, 478 aa, Homo sapiens; identical to SEQ ID NO: 69

SEQ ID NO: 788 - protein, 406 aa, Homo sapiens; identical to SEQ ID NO: 135

SEQ ID NO: 789 - protein, 1065 aa, Homo sapiens; identical to SEQ ID NO: 131

SEQ ID NO: 790 - protein, 525 aa, Homo sapiens; identical to SEQ ID NO: 31

SEQ ID NO: 791 - protein, 406 aa, Homo sapiens; identical to SEQ ID NO: 135

SEQ ID NO: 792 - protein, 201 aa, Homo sapiens; identical to SEQ ID NO: 27

SEQ ID NO: 793 - protein, 525 aa, Homo sapiens; identical to SEQ ID NO: 31

SEQ ID NO: 794 - protein, 418 aa, Homo sapiens; identical to SEQ ID NO: 24

SEQ ID NO: 795 - protein, 644 aa, Homo sapiens; identical to SEQ ID NO: 180

SEQ ID NO: 796 - protein, 698 aa, Homo sapiens; identical to SEQ ID NO: 76

SEQ ID NO: 797 - protein, 395 aa, Homo sapiens; identical to SEQ ID NO: 35

SEQ ID NO: 798 - protein, 698 aa, Homo sapiens; identical to SEQ ID NO: 76

SEQ ID NO: 799 - protein, 201 aa, Homo sapiens; identical to SEQ ID NO: 27

SEQ ID NO: 800 - protein, 1065 aa, Homo sapiens; identical to SEQ ID NO: 131

SEQ ID NO: 801 - protein, 418 aa, Homo sapiens; identical to SEQ ID NO: 24

SEQ ID NO: 802 - protein, 638 aa, Homo sapiens; identical to SEQ ID NO: 36

SEQ ID NO: 803 - protein, 399 aa, Homo sapiens; identical to SEQ ID NO: 34

SEQ ID NO: 804 - protein, 406 aa, Homo sapiens; identical to SEQ ID NO: 135

SEQ ID NO: 805 - protein, 367 aa, Homo sapiens; identical to SEQ ID NO: 38

SEQ ID NO: 806 - protein, 406 aa, Homo sapiens; identical to SEQ ID NO: 135

SEQ ID NO: 807 - protein, 1231 aa, Homo sapiens; identical to SEQ ID NO: 42

SEQ ID NO: 808 - protein, 201 aa, Homo sapiens; identical to SEQ ID NO: 27

SEQ ID NO: 809 - protein, 500 aa, Homo sapiens; identical to SEQ ID NO: 137

SEQ ID NO: 810 - protein, 462 aa, Homo sapiens; identical to SEQ ID NO: 39

SEQ ID NO: 811 - protein, 638 aa, Homo sapiens; identical to SEQ ID NO: 36

SEQ ID NO: 812 - protein, 159 aa, Homo sapiens; identical to SEQ ID NO: 70

SEQ ID NO: 813 - protein, 201 aa, Homo sapiens; identical to SEQ ID NO: 28

SEQ ID NO: 814 - protein, 698 aa, Homo sapiens; identical to SEQ ID NO: 76

SEQ ID NO: 815 - protein, 474 aa, Homo sapiens; identical to SEQ ID NO: 142

SEQ ID NO: 816 - protein, 644 aa, Homo sapiens; identical to SEQ ID NO: 180

SEQ ID NO: 817 - protein, 330 aa, Homo sapiens; identical to SEQ ID NO: 44

SEQ ID NO: 818 - protein, 399 aa, Homo sapiens; identical to SEQ ID NO: 34

SEQ ID NO: 819 - protein, 201 aa, Homo sapiens; identical to SEQ ID NO: 27

SEQ ID NO: 820 - protein, 418 aa, Homo sapiens; identical to SEQ ID NO: 24

SEQ ID NO: 821 - protein, 644 aa, Homo sapiens; identical to SEQ ID NO: 180

SEQ ID NO: 822 - protein, 752 aa, Homo sapiens; identical to SEQ ID NO: 417

SEQ ID NO: 823 - protein, 525 aa, Homo sapiens; identical to SEQ ID NO: 31

SEQ ID NO: 824 - protein, 189 aa, Homo sapiens; identical to SEQ ID NO: 43

SEQ ID NO: 825 - protein, 599 aa, Homo sapiens; identical to SEQ ID NO: 447

SEQ ID NO: 826 - protein, 30 aa, synthetic construct; identical to SEQ ID NO: 78
  CARBOHYD 7: note = N is linked to the N-linked glycan structure Hex(5)HexNAc(4)Fuc(0)NeuAc(2)

SEQ ID NO: 827 - protein, 10 aa, synthetic construct
DIENFNSTQK

SEQ ID NO: 828 - protein, 15 aa, synthetic construct
QDQCIYNTTYLNVQR

SEQ ID NO: 829 - protein, 24 aa, synthetic construct
SVQEIQATFFYFTPNKTEDTIFLR

SEQ ID NO: 830 - protein, 13 aa, synthetic construct
ISEENETTCYMGK

SEQ ID NO: 831 - protein, 13 aa, synthetic construct
NLFLNHSENATAK

SEQ ID NO: 832 - protein, 13 aa, synthetic construct
NLFLNHSENATAK

SEQ ID NO: 833 - protein, 16 aa, synthetic construct
  CARBOHYD 6: note = N is linked to the glycan structure Hex(6)HexNAc(5)Fuc(1)NeuAc(1)
VVLHPNYSQVDIGLIK

SEQ ID NO: 834 - protein, 9 aa, synthetic construct
EEQYNSTYR

SEQ ID NO: 835 - protein, 21 aa, synthetic construct
QQQHLFGSNVTDCSGNFCLFR

SEQ ID NO: 836 - protein, 24 aa, synthetic construct
QIPLCANLVPVPITNATLDQITGK

SEQ ID NO: 837 - protein, 20 aa, synthetic construct
ACLNSTYEYIFNNCHELYSR

SEQ ID NO: 838 - protein, 32 aa, synthetic construct; identical to SEQ ID NO: 48

SEQ ID NO: 839 - protein, 16 aa, synthetic construct
YLGNATAIFFLPDEGK

SEQ ID NO: 840 - protein, 16 aa, synthetic construct
YLGNATAIFFLPDEGK

SEQ ID NO: 841 - protein, 16 aa, synthetic construct
YLGNATAIFFLPDEGK

SEQ ID NO: 842 - protein, 33 aa, synthetic construct; identical to SEQ ID NO: 81

SEQ ID NO: 843 - protein, 32 aa, synthetic construct; identical to SEQ ID NO: 84

SEQ ID NO: 844 - protein, 32 aa, synthetic construct; identical to SEQ ID NO: 84

SEQ ID NO: 845 - protein, 20 aa, synthetic construct
FNLTETSEAEIHQSFQHLLR

SEQ ID NO: 846 - protein, 20 aa, synthetic construct
TLNQSSDELQLSMGNAMFVK

SEQ ID NO: 847 - protein, 16 aa, synthetic construct
YTGNASALFILPDQDK

SEQ ID NO: 848 - protein, 16 aa, synthetic construct
YTGNASALFILPDQDK

SEQ ID NO: 849 - protein, 16 aa, synthetic construct
YTGNASALFILPDQDK

SEQ ID NO: 850 - protein, 7 aa, synthetic construct
ENGTISR

SEQ ID NO: 851 - protein, 24 aa, synthetic construct
QIPLCANLVPVPITNATLDQITGK

SEQ ID NO: 852 - protein, 24 aa, synthetic construct
QIPLCANLVPVPITNATLDQITGK

SEQ ID NO: 853 - protein, 15 aa, synthetic construct
QDQCIYNTTYLNVQR

SEQ ID NO: 854 - protein, 15 aa, synthetic construct
QDQCIYNTTYLNVQR

SEQ ID NO: 855 - protein, 15 aa, synthetic construct
QDQCIYNTTYLNVQR

SEQ ID NO: 856 - protein, 15 aa, synthetic construct
QDQCIYNTTYLNVQR

SEQ ID NO: 857 - protein, 19 aa, synthetic construct
FSEFWDLDPEVRPTSAVAA

SEQ ID NO: 858 - protein, 22 aa, synthetic construct
ADGTVNQIEGEATPVNLTEPAK

SEQ ID NO: 859 - protein, 16 aa, synthetic construct
EHEGAIYPDNTTDFQR

SEQ ID NO: 860 - protein, 16 aa, synthetic construct
EHEGAIYPDNTTDFQR

SEQ ID NO: 861 - protein, 20 aa, synthetic construct
ENLTAPGSDSAVFFEQGTTR

SEQ ID NO: 862 - protein, 17 aa, synthetic construct
ELHHLQEQNVSNAFLDK

SEQ ID NO: 863 - protein, 17 aa, synthetic construct
ELHHLQEQNVSNAFLDK

SEQ ID NO: 864 - protein, 13 aa, synthetic construct
MDGASNVTCINSR

SEQ ID NO: 865 - protein, 13 aa, synthetic construct
MDGASNVTCINSR

SEQ ID NO: 866 - protein, 18 aa, synthetic construct
IPCSQPPQIEHGTINSSR

SEQ ID NO: 867 - protein, 14 aa, synthetic construct
LANLTQGEDQYYLR

SEQ ID NO: 868 - protein, 14 aa, synthetic construct
QSVPAHFVALNGSK

SEQ ID NO: 869 - protein, 6 aa, synthetic construct
ANISHK

SEQ ID NO: 870 - protein, 15 aa, synthetic construct
EYESYSDFERNVTEK

SEQ ID NO: 871 - protein, 13 aa, synthetic construct
WNCWSNWSSCSGR

SEQ ID NO: 872 - protein, 15 aa, synthetic construct
VCQDCPLLAPLNDTR

SEQ ID NO: 873 - protein, 15 aa, synthetic construct
VCQDCPLLAPLNDTR

SEQ ID NO: 874 - protein, 22 aa, synthetic construct
  CARBOHYD 11: note = N is linked to the glycan structure Hex(6)HexNAc(5)Fuc(1)NeuAc(3)
  CARBOHYD 11: note = N is linked to the glycan structure Hex(6)HexNAc(5)Fuc(0)NeuAc(2)
  CARBOHYD 11: note = N is linked to the glycan structure Hex(6)HexNAc(5)Fuc(0)NeuAc(1)
AALAAFNAQNNGSNFQLEEISR

SEQ ID NO: 875 - protein, 22 aa, synthetic construct
  CARBOHYD 11: note = N is linked to the glycan structure Hex(6)HexNAc(5)Fuc(1)NeuAc(3)
  CARBOHYD 11: note = N is linked to the glycan structure Hex(6)HexNAc(5)Fuc(0)NeuAc(2)
  CARBOHYD 11: note = N is linked to the glycan structure Hex(6)HexNAc(5)Fuc(0)NeuAc(1)
AALAAFNAQNNGSNFQLEEISR

SEQ ID NO: 876 - protein, 13 aa, synthetic construct
LQNNENNISCVER

SEQ ID NO: 877 - protein, 13 aa, synthetic construct
SWPAVGNCSSALR

SEQ ID NO: 878 - protein, 13 aa, synthetic construct
SWPAVGNCSSALR

SEQ ID NO: 879 - protein, 16 aa, synthetic construct
ALPQPQNVTSLLGCTH

SEQ ID NO: 880 - protein, 24 aa, synthetic construct
  CARBOHYD 6: note = N is linked to the N-linked glycan structure Hex(5)HexNAc(4)Fuc(0)NeuAc(2)
MVSHHNLTTGATLINEQWLLTTAK

SEQ ID NO: 881 - protein, 24 aa, synthetic construct
  CARBOHYD 6: note = N is linked to the N-linked glycan structure Hex(5)HexNAc(4)Fuc(0)NeuAc(2)
MVSHHNLTTGATLINEQWLLTTAK

SEQ ID NO: 882 - protein, 24 aa, synthetic construct
  CARBOHYD 6: note = N is linked to the N-linked glycan structure Hex(5)HexNAc(4)Fuc(0)NeuAc(2)
MVSHHNLTTGATLINEQWLLTTAK

SEQ ID NO: 883 - protein, 13 aa, synthetic construct
NLFLNHSENATAK

SEQ ID NO: 884 - protein, 13 aa, synthetic construct
NLFLNHSENATAK

SEQ ID NO: 885 - protein, 16 aa, synthetic construct
  CARBOHYD 6: note = N is linked to the glycan structure Hex(6)HexNAc(5)Fuc(1)NeuAc(1)
VVLHPNYSQVDIGLIK

SEQ ID NO: 886 - protein, 16 aa, synthetic construct
  CARBOHYD 6: note = N is linked to the glycan structure Hex(6)HexNAc(5)Fuc(1)NeuAc(1)
VVLHPNYSQVDIGLIK

SEQ ID NO: 887 - protein, 19 aa, synthetic construct
VIDFNCTTSSVSSALANTK

SEQ ID NO: 888 - protein, 19 aa, synthetic construct
VIDFNCTTSSVSSALANTK

SEQ ID NO: 889 - protein, 14 aa, synthetic construct
SSTTKPPFKPHGSR

SEQ ID NO: 890 - protein, 14 aa, synthetic construct
HSHNNNSSDLHPHK

SEQ ID NO: 891 - protein, 19 aa, synthetic construct
VLSNNSDANLELINTWVAK

SEQ ID NO: 892 - protein, 21 aa, synthetic construct
VGQLQLSHNLSLVILVPQNLK

SEQ ID NO: 893 - protein, 8 aa, synthetic construct
VATTVISK

SEQ ID NO: 894 - protein, 27 aa, synthetic construct
LSLHRPALEDLLLGSEANLTCTLTGLR

SEQ ID NO: 895 - protein, 27 aa, synthetic construct
LSLHRPALEDLLLGSEANLTCTLTGLR

SEQ ID NO: 896 - protein, 27 aa, synthetic construct
LSLHRPALEDLLLGSEANLTCTLTGLR

SEQ ID NO: 897 - protein, 27 aa, synthetic construct
LSLHRPALEDLLLGSEANLTCTLTGLR

SEQ ID NO: 898 - protein, 27 aa, synthetic construct
LSLHRPALEDLLLGSEANLTCTLTGLR

SEQ ID NO: 899 - protein, 9 aa, synthetic construct
TPLTANITK

SEQ ID NO: 900 - protein, 9 aa, synthetic construct
EEQYNSTYR

SEQ ID NO: 901 - protein, 9 aa, synthetic construct
EEQYNSTYR

SEQ ID NO: 902 - protein, 9 aa, synthetic construct
EEQYNSTYR

SEQ ID NO: 903 - protein, 9 aa, synthetic construct
EEQYNSTYR

SEQ ID NO: 904 - protein, 9 aa, synthetic construct
EEQYNSTYR

SEQ ID NO: 905 - protein, 9 aa, synthetic construct
EEQYNSTYR

SEQ ID NO: 906 - protein, 9 aa, synthetic construct
EEQYNSTYR

SEQ ID NO: 907 - protein, 9 aa, synthetic construct
EEQYNSTYR

SEQ ID NO: 908 - protein, 9 aa, synthetic construct
  CARBOHYD 5: note = N is linked to the glycan structure Hex(3)HexNAc(3)Fuc(1)NeuAc(0)
EEQFNSTFR

SEQ ID NO: 909 - protein, 9 aa, synthetic construct
  CARBOHYD 5: note = N is linked to the glycan structure Hex(3)HexNAc(3)Fuc(1)NeuAc(0)
EEQFNSTFR

SEQ ID NO: 910 - protein, 9 aa, synthetic construct
  CARBOHYD 5: note = N is linked to the glycan structure Hex(3)HexNAc(3)Fuc(1)NeuAc(0)
EEQFNSTFR

SEQ ID NO: 911 - protein, 9 aa, synthetic construct
  CARBOHYD 5: note = N is linked to the glycan structure Hex(3)HexNAc(3)Fuc(1)NeuAc(0)
EEQFNSTFR

SEQ ID NO: 912 - protein, 9 aa, synthetic construct
  CARBOHYD 5: note = N is linked to the glycan structure Hex(3)HexNAc(3)Fuc(1)NeuAc(0)
EEQFNSTFR

SEQ ID NO: 913 - protein, 9 aa, synthetic construct
EEQYNSTFR

SEQ ID NO: 914 - protein, 9 aa, synthetic construct
EEQYNSTFR

SEQ ID NO: 915 - protein, 11 aa, synthetic construct
ENISDPTSPLR

SEQ ID NO: 916 - protein, 21 aa, synthetic construct
  CARBOHYD 7: note = N is linked to the glycan structure Hex(5)HexNAc(5)Fuc(0)NeuAc(0)
GLTFQQNASSMCVPDQDTAIR

SEQ ID NO: 917 - protein, 21 aa, synthetic construct
  CARBOHYD 7: note = N is linked to the glycan structure Hex(5)HexNAc(5)Fuc(0)NeuAc(0)
GLTFQQNASSMCVPDQDTAIR

SEQ ID NO: 918 - protein, 21 aa, synthetic construct
  CARBOHYD 7: note = N is linked to the glycan structure Hex(5)HexNAc(5)Fuc(0)NeuAc(0)
GLTFQQNASSMCVPDQDTAIR

SEQ ID NO: 919 - protein, 21 aa, synthetic construct
  CARBOHYD 7: note = N is linked to the glycan structure Hex(5)HexNAc(5)Fuc(0)NeuAc(0)
GLTFQQNASSMCVPDQDTAIR

SEQ ID NO: 920 - protein, 25 aa, synthetic construct
LPTQNITFQTESSVAEQEAEFQSPK

SEQ ID NO: 921 - protein, 8 aa, synthetic construct
  CARBOHYD 5: note = N is linked to the N-linked glycan structure Hex(5)HexNAc(4)Fuc(0)NeuAc(2)
GVNFNVSK

SEQ ID NO: 922 - protein, 21 aa, synthetic construct
IVGGTNSSWGEWPWQVSLQVK

SEQ ID NO: 923 - protein, 19 aa, synthetic construct
LQAPLNYTEFQKPICLPSK

SEQ ID NO: 924 - protein, 19 aa, synthetic construct
LQAPLNYTEFQKPICLPSK

SEQ ID NO: 925 - protein, 43 aa, synthetic construct; identical to SEQ ID NO: 769

SEQ ID NO: 926 - protein, 12 aa, synthetic construct
  CARBOHYD 9: note = N is linked to the N-linked glycan structure Hex(5)HexNAc(4)Fuc(0)NeuAc(2)
ITYSIVQTNCSK

SEQ ID NO: 927 - protein, 12 aa, synthetic construct
LNAENNATFYFK

SEQ ID NO: 928 - protein, 21 aa, synthetic construct
TPEVTCVVVDVSHEDPEVQFK

SEQ ID NO: 929 - protein, 8 aa, synthetic construct
AVLTIDEK

SEQ ID NO: 930 - protein, 10 aa, synthetic construct
DLLLPQPDLR

SEQ ID NO: 931 - protein, 13 aa, synthetic construct
SLDFTELDVAAEK

SEQ ID NO: 932 - protein, 10 aa, synthetic construct
VNHVTLSQPK

SEQ ID NO: 933 - protein, 17 aa, synthetic construct
TTPPVLDSDGSFFLYSR

SEQ ID NO: 934 - protein, 8 aa, synthetic construct
DDTVCLAK

SEQ ID NO: 935 - protein, 15 aa, synthetic construct
VTACHSSQPNATLYK

SEQ ID NO: 936 - protein, 26 aa, synthetic construct
  CARBOHYD 17: note = N is linked to the N-linked glycan structure Hex(5)HexNAc(4)Fuc(0)NeuAc(2)
WVLTAAHCLLYPPWDKNFTENDLLVR

SEQ ID NO: 937 - protein, 13 aa, synthetic construct
CGLVPVLAENYNK

SEQ ID NO: 938 - protein, 21 aa, synthetic construct
QQQHLFGSNVTDCSGNFCLFR

SEQ ID NO: 939 - protein, 21 aa, synthetic construct
QQQHLFGSNVTDCSGNFCLFR

SEQ ID NO: 940 - protein, 21 aa, synthetic construct
QQQHLFGSNVTDCSGNFCLFR

SEQ ID NO: 941 - protein, 21 aa, synthetic construct
QQQHLFGSNVTDCSGNFCLFR

SEQ ID NO: 942 - protein, 8 aa, synthetic construct
  CARBOHYD 1: note = N is linked to the glycan structure Hex(6)HexNAc(3)Fuc(0)NeuAc(1)
NGSLFAFR

SEQ ID NO: 943 - protein, 23 aa, synthetic construct
NNATVHEQVGGPSLTSDLQAQSK

SEQ ID NO: 944 - protein, 22 aa, synthetic construct
VTQVYAENGTVLQGSTVASVYK

SEQ ID NO: 945 - protein, 20 aa, synthetic construct
ACLNSTYEYIFNNCHELYSR

SEQ ID NO: 946 - protein, 15 aa, synthetic construct
NPWGQVEWNGSWSDR

SEQ ID NO: 947 - protein, 20 aa, synthetic construct
ACLNSTYEYIFNNCHELYSR

SEQ ID NO: 948 - protein, 15 aa, synthetic construct
NPWGQVEWNGSWSDR

SEQ ID NO: 949 - protein, 20 aa, synthetic construct
FNLTETSEAEIHQSFQHLLR

SEQ ID NO: 950 - protein, 32 aa, synthetic construct; identical to SEQ ID NO: 48

SEQ ID NO: 951 - protein, 24 aa, synthetic construct
QIPLCANLVPVPITNATLDQITGK

SEQ ID NO: 952 - protein, 22 aa, synthetic construct
  CARBOHYD 11: note = N is linked to the glycan structure Hex(6)HexNAc(5)Fuc(1)NeuAc(3)
  CARBOHYD 11: note = N is linked to the glycan structure Hex(6)HexNAc(5)Fuc(0)NeuAc(2)
  CARBOHYD 11: note = N is linked to the glycan structure Hex(6)HexNAc(5)Fuc(0)NeuAc(1)
AALAAFNAQNNGSNFQLEEISR

SEQ ID NO: 953 - protein, 25 aa, synthetic construct
LPTQNITFQTESSVAEQEAEFQSPK

SEQ ID NO: 954 - protein, 22 aa, synthetic construct
VTQVYAENGTVLQGSTVASVYK

SEQ ID NO: 955 - protein, 24 aa, synthetic construct
QIPLCANLVPVPITNATLDQITGK

SEQ ID NO: 956 - protein, 418 aa, Homo sapiens; identical to SEQ ID NO: 24
  CARBOHYD 70: note = N is linked to the N-linked glycan structure Hex(5)HexNAc(4)Fuc(1)NeuAc(2)
  CARBOHYD 107: note = N is linked to the  glycan structure Hex(6)HexNAc(5)Fuc(0)NeuAc(2)
  CARBOHYD 271: note = N is linked to the N-linked glycan structure Hex(5)HexNAc(4)Fuc(0)NeuAc(1)
  CARBOHYD 271: note = N is linked to the N-linked glycan structure Hex(5)HexNAc(4)Fuc(0)NeuAc(2)
  CARBOHYD 271: note = N is linked to the N-linked glycan structure Hex(6)HexNAc(5)Fuc(0)NeuAc(3)
  CARBOHYD 107: note = N is linked to the N-linked glycan structure Hex(5)HexNAc(4)Fuc(1)NeuAc(1)

SEQ ID NO: 957 - protein, 1474 aa, Homo sapiens; identical to SEQ ID NO: 25

SEQ ID NO: 958 - protein, 638 aa, Homo sapiens; identical to SEQ ID NO: 36

SEQ ID NO: 959 - protein, 622 aa, Homo sapiens; identical to SEQ ID NO: 41
  CARBOHYD 416: note = N is linked to the N-linked glycan structure Hex(5)HexNAc(4)Fuc(0)NeuAc(2)

SEQ ID NO: 960 - protein, 1065 aa, Homo sapiens; identical to SEQ ID NO: 131
  CARBOHYD 138: note = N is linked to the N-linked glycan structure Hex(5)HexNAc(4)Fuc(0)NeuAc(2)
  CARBOHYD 138: note = N is linked to the N-linked glycan structure Hex(5)HexNAc(4)Fuc(1)NeuAc(2)
  CARBOHYD 397: note = N is linked to the N-linked glycan structure Hex(6)HexNAc(5)Fuc(0)NeuAc(3)
  CARBOHYD 762: note = N is linked to the glycan structure Hex(6)HexNAc(5)Fuc(1)NeuAc(2)
  CARBOHYD 762: note = N is linked to the glycan structure Hex(6)HexNAc(5)Fuc(2)NeuAc(3)

SEQ ID NO: 961 - protein, 622 aa, Homo sapiens; identical to SEQ ID NO: 41

SEQ ID NO: 962 - protein, 406 aa, Homo sapiens; identical to SEQ ID NO: 135
  CARBOHYD 207: note = N is linked to the glycan structures Hex(5)HexNAc(4)Fuc(0)NeuAc(1) and Hex(5)HexNAc(4)Fuc(0)NeuAc(2)
  CARBOHYD 207: note = N is linked to the N-linked glycan structure Hex(5)HexNAc(4)Fuc(0)NeuAc(1)
  CARBOHYD 241: note = N is linked to the N-linked glycan structure Hex(5)HexNAc(4)Fuc(1)NeuAc(2)
  CARBOHYD 184: note = N is linked to the N-linked glycan structure Hex(5)HexNAc(4)Fuc(1)NeuAc(2)
  CARBOHYD 184: note = N is linked to the glycan structure Hex(5)HexNAc(5)Fuc(1)NeuAc(1)
  CARBOHYD 184: note = N is linked to the glycan structure Hex(6)HexNAc(5)Fuc(1)NeuAc(3)
  CARBOHYD 207: note = N is linked to the glycan structures Hex(5)HexNAc(4)Fuc(0)NeuAc(2) and Hex(6)HexNAc(5)Fuc(0)NeuAc(2)
  CARBOHYD 207: note = N is linked to the glycan structure Hex(6)HexNAc(5)Fuc(0)NeuAc(2)
  CARBOHYD 241: note = N is linked to the N-linked glycan structure Hex(5)HexNAc(4)Fuc(0)NeuAc(1)
  CARBOHYD 241: note = N is linked to the glycan structure Hex(6)HexNAc(5)Fuc(1)NeuAc(3)

SEQ ID NO: 963 - protein, 423 aa, Homo sapiens; identical to SEQ ID NO: 26
  CARBOHYD 106: note = N is linked to the N-linked glycan structure Hex(7)HexNAc(6)Fuc(0)NeuAc(4)
  CARBOHYD 127: note = N is linked to the N-linked glycan structure Hex(5)HexNAc(4)Fuc(0)NeuAc(1)
  CARBOHYD 271: note = N is linked to the glycan structure Hex(6)HexNAc(5)Fuc(0)NeuAc(2)
  CARBOHYD 271: note = N is linked to the N-linked glycan structure Hex(7)HexNAc(6)Fuc(0)NeuAc(2)
  CARBOHYD 271: note = N is linked to the glycan structure Hex(7)HexNAc(6)Fuc(0)NeuAc(3)

SEQ ID NO: 964 - protein, 485 aa, Homo sapiens; identical to SEQ ID NO: 182

SEQ ID NO: 965 - protein, 1474 aa, Homo sapiens; identical to SEQ ID NO: 25
  CARBOHYD 247: note = N is linked to the glycan structure Hex(5)HexNAc(2)Fuc(0)NeuAc(0)
  CARBOHYD 869: note = N is linked to the glycan structure Hex(5)HexNAc(2)Fuc(0)NeuAc(0)
  CARBOHYD 869: note = N is linked to the  glycan structure Hex(6)HexNAc(2)Fuc(0)NeuAc(0)

SEQ ID NO: 966 - protein, 1676 aa, Homo sapiens; identical to SEQ ID NO: 132
  CARBOHYD 741: note = N is linked to the N-linked glycan structure Hex(5)HexNAc(4)Fuc(1)NeuAc(2)

SEQ ID NO: 967 - protein, 644 aa, Homo sapiens; identical to SEQ ID NO: 180
  CARBOHYD 205: note = N is linked to the N-linked glycan structure Hex(5)HexNAc(4)Fuc(1)NeuAc(2)
  CARBOHYD 294: note = N is linked to the N-linked glycan structure Hex(5)HexNAc(4)Fuc(1)NeuAc(2)

SEQ ID NO: 968 - protein, 159 aa, Homo sapiens; identical to SEQ ID NO: 70
  CARBOHYD 71: note = N is linked to the N-linked glycan structure Hex(5)HexNAc(4)Fuc(1)NeuAc(2)

SEQ ID NO: 969 - protein, 399 aa, Homo sapiens; identical to SEQ ID NO: 34
  CARBOHYD 297: note = K is linked to the N-linked glycan structure Hex(5)HexNAc(4)Fuc(0)NeuAc(0)
  CARBOHYD 297: note = K is linked to the glycan structure Hex(3)HexNAc(4)Fuc(1)NeuAc(0)
  CARBOHYD 297: note = K is linked to the glycan structure Hex(4)HexNAc(4)Fuc(0)NeuAc(0)
  CARBOHYD 297: note = K is linked to the glycan structure Hex(4)HexNAc(5)Fuc(0)NeuAc(0)
  CARBOHYD 297: note = K is linked to the glycan structure Hex(4)HexNAc(5)Fuc(1)NeuAc(0)
  CARBOHYD 297: note = K is linked to the glycan structure Hex(4)HexNAc(5)Fuc(1)NeuAc(1)
  CARBOHYD 297: note = K is linked to the N-linked glycan structure Hex(5)HexNAc(4)Fuc(1)NeuAc(0)
  CARBOHYD 297: note = K is linked to the N-linked glycan structure Hex(5)HexNAc(4)Fuc(1)NeuAc(1)
  CARBOHYD 297: note = K is linked to the glycan structure Hex(5)HexNAc(5)Fuc(1)NeuAc(0)

SEQ ID NO: 970 - protein, 396 aa, Homo sapiens; identical to SEQ ID NO: 568
  CARBOHYD 297: note = W is linked to the glycan structure Hex(4)HexNAc(4)Fuc(1)NeuAc(0)
  CARBOHYD 297: note = W is linked to the N-linked glycan structure Hex(4)HexNAc(4)Fuc(1)NeuAc(0)

SEQ ID NO: 971 - protein, 474 aa, Homo sapiens; identical to SEQ ID NO: 142
  CARBOHYD 209: note = N is linked to the glycan structure Hex(5)HexNAc(5)Fuc(0)NeuAc(0)
  CARBOHYD 209: note = N is linked to the glycan structure Hex(5)HexNAc(5)Fuc(0)NeuAc(1)
  CARBOHYD 209: note = N is linked to the glycan structure Hex(5)HexNAc(5)Fuc(1)NeuAc(0)
  CARBOHYD 209: note = N is linked to the glycan structure Hex(5)HexNAc(5)Fuc(1)NeuAc(2)

SEQ ID NO: 972 - protein, 391 aa, Homo sapiens; identical to SEQ ID NO: 33
  CARBOHYD 144: note = G is linked to the N-linked  glycan structure Hex(3)HexNAc(5)Fuc(0)NeuAc(0)
  CARBOHYD 144: note = G is linked to the N-linked glycan structure Hex(4)HexNAc(4)Fuc(0)NeuAc(1)
  CARBOHYD 144: note = G is linked to the N-linked glycan structure Hex(4)HexNAc(5)Fuc(0)NeuAc(0)
  CARBOHYD 144: note = G is linked to the glycan structure Hex(5)HexNAc(5)Fuc(0)NeuAc(1)
  CARBOHYD 144: note = G is linked to the glycan structure Hex(5)HexNAc(5)Fuc(0)NeuAc(2)
  CARBOHYD 205: note = N is linked to the N-linked glycan structure Hex(4)HexNAc(5)Fuc(1)NeuAc(0)

SEQ ID NO: 973 - protein, 99 aa, Homo sapiens; identical to SEQ ID NO: 30

SEQ ID NO: 974 - protein, 347 aa, Homo sapiens; identical to SEQ ID NO: 144

SEQ ID NO: 975 - protein, 201 aa, Homo sapiens; identical to SEQ ID NO: 27
  CARBOHYD 93: note = N is linked to the glycan structure Hex(6)HexNAc(5)Fuc(0)NeuAc(2)
  CARBOHYD 72: note = N is linked to the glycan structure Hex(7)HexNAc(6)Fuc(1)NeuAc(4)
  CARBOHYD 33: note = N is linked to the N-linked glycan structure Hex(6)HexNAc(5)Fuc(0)NeuAc(3)
  CARBOHYD 103: note = N is linked to the N-linked glycan structure Hex(6)HexNAc(5)Fuc(0)NeuAc(3)
  CARBOHYD 33: note = N is linked to the glycan structure Hex(6)HexNAc(5)Fuc(0)NeuAc(2)
  CARBOHYD 93: note = N is linked to the N-linked glycan structure Hex(6)HexNAc(5)Fuc(0)NeuAc(3)
  CARBOHYD 93: note = N is linked to the glycan structure Hex(7)HexNAc(6)Fuc(0)NeuAc(3)
  CARBOHYD 93: note = N is linked to the glycan structure Hex(7)HexNAc(6)Fuc(1)Neu(5)Ac(2)
  CARBOHYD 93: note = N is linked to the glycan structure Hex(8)HexNAc(7)Fuc(0)NeuAc(4)
  CARBOHYD 33: note = N is linked to the N-linked glycan structure Hex(5)HexNAc(4)Fuc(0)NeuAc(2)

SEQ ID NO: 976 - protein, 367 aa, Homo sapiens; identical to SEQ ID NO: 38
  CARBOHYD 156: note = N is linked to the N-linked glycan structure Hex(5)HexNAc(4)Fuc(0)NeuAc(2)
  CARBOHYD 156: note = N is linked to the N-linked glycan structure Hex(5)HexNAc(4)Fuc(1)NeuAc(2)
  CARBOHYD 176: note = N is linked to the N-linked glycan structure Hex(5)HexNAc(4)Fuc(1)NeuAc(2)
  CARBOHYD 176: note = N is linked to the glycan structure Hex(6)HexNAc(5)Fuc(0)NeuAc(1)
  CARBOHYD 176: note = N is linked to the glycan structure Hex(7)HexNAc(6)Fuc(0)NeuAc(0)

SEQ ID NO: 977 - protein, 698 aa, Homo sapiens; identical to SEQ ID NO: 76
  CARBOHYD 630: note = N is linked to the N-linked glycan structure Hex(5)HexNAc(4)Fuc(0)NeuAc(0)
  CARBOHYD 432: note = N is linked to the N-linked glycan structure Hex(5)HexNAc(4)Fuc(0)NeuAc(1)
  CARBOHYD 630: note = N is linked to the N-linked glycan structure Hex(5)HexNAc(4)Fuc(0)NeuAc(1)
  CARBOHYD 630: note = N is linked to the N-linked glycan structure Hex(5)HexNAc(4)Fuc(1)NeuAc(1)
  CARBOHYD 630: note = N is linked to the N-linked glycan structure Hex(5)HexNAc(4)Fuc(1)NeuAc(2)
  CARBOHYD 630: note = N is linked to the glycan structure Hex(6)HexNAc(5)Fuc(1)NeuAc(3)

SEQ ID NO: 978 - protein, 462 aa, Homo sapiens; identical to SEQ ID NO: 39
  CARBOHYD 187: note = N is linked to the N-linked glycan structure Hex(5)HexNAc(4)Fuc(1)NeuAc(2)
  CARBOHYD 453: note = N is linked to the N-linked glycan structure Hex(5)HexNAc(4)Fuc(0)NeuAc(1)

SEQ ID NO: 979 - protein, 638 aa, Homo sapiens; identical to SEQ ID NO: 36
  CARBOHYD 127: note = N is linked to the N-linked glycan structure Hex(5)HexNAc(4)Fuc(1)NeuAc(0)
  CARBOHYD 396: note = N is linked to the N-linked glycan structure Hex(5)HexNAc(4)Fuc(0)NeuAc(1)
  CARBOHYD 494: note = N is linked to the N-linked glycan structure Hex(5)HexNAc(4)Fuc(0)NeuAc(0)
  CARBOHYD 494: note = N is linked to the N-linked glycan structure Hex(5)HexNAc(4)Fuc(1)NeuAc(0)

SEQ ID NO: 980 - protein, 478 aa, Homo sapiens; identical to SEQ ID NO: 69
  CARBOHYD 169: note = N is linked to the N-linked glycan structure Hex(5)HexNAc(4)Fuc(0)NeuAc(1)
  CARBOHYD 86: note = N is linked to the N-linked glycan structure Hex(6)HexNAc(5)Fuc(0)NeuAc(3)

SEQ ID NO: 981 - protein, 525 aa, Homo sapiens; identical to SEQ ID NO: 31
  CARBOHYD 125: note = N is linked to the N-linked glycan structure Hex(5)HexNAc(4)Fuc(0)NeuAc(1)
  CARBOHYD 125: note = N is linked to the N-linked glycan structure Hex(5)HexNAc(4)Fuc(0)NeuAc(2)
  CARBOHYD 271: note = S is linked to the O-linked glycan structure Hex(2)HexNAc(2)Fuc(0)NeuAc(2)
  CARBOHYD 345: note = N is linked to the N-linked glycan structure Hex(5)HexNAc(4)Fuc(1)NeuAc(2)

SEQ ID NO: 982 - protein, 189 aa, Homo sapiens; identical to SEQ ID NO: 43
  CARBOHYD 98: note = N is linked to the N-linked glycan structure Hex(5)HexNAc(4)Fuc(1)NeuAc(2)

SEQ ID NO: 983 - protein, 500 aa, Homo sapiens; identical to SEQ ID NO: 137
  CARBOHYD 253: note = N is linked to the N-linked glycan structure Hex(5)HexNAc(4)Fuc(1)NeuAc(2)
  CARBOHYD 352: note = N is linked to the N-linked glycan structure Hex(5)HexNAc(4)Fuc(1)NeuAc(2)
  CARBOHYD 48: note = T is linked to the O-linked glycan structure Hex(1)HexNAc(1)Fuc(0)NeuAc(2)

SEQ ID NO: 984 - protein, 415 aa, Homo sapiens; identical to SEQ ID NO: 552
  CARBOHYD 36: note = N is linked to the N-linked glycan structure Hex(5)HexNAc(4)Fuc(0)NeuAc(2)

SEQ ID NO: 985 - protein, 752 aa, Homo sapiens; identical to SEQ ID NO: 417
  CARBOHYD 621: note = N is linked to the glycan structure Hex(6)HexNAc(2)Fuc(0)NeuAc(0)

SEQ ID NO: 986 - protein, 591 aa, Homo sapiens; identical to SEQ ID NO: 554
  CARBOHYD 243: note = N is linked to the glycan structure Hex(6)HexNAc(6)Fuc(1)NeuAc(0)
  CARBOHYD 553: note = N is linked to the N-linked glycan structure Hex(5)HexNAc(4)Fuc(1)NeuAc(0)

SEQ ID NO: 987 - protein, 1231 aa, Homo sapiens; identical to SEQ ID NO: 42
  CARBOHYD 911: note = N is linked to the N-linked glycan structure Hex(5)HexNAc(4)Fuc(0)NeuAc(1)
  CARBOHYD 1029: note = N is linked to the N-linked glycan structure Hex(5)HexNAc(4)Fuc(0)NeuAc(1)
  CARBOHYD 1029: note = N is linked to the N-linked glycan structure Hex(5)HexNAc(4)Fuc(0)NeuAc(2)
  CARBOHYD 882: note = N is linked to the N-linked glycan structure Hex(5)HexNAc(4)Fuc(0)NeuAc(1)

SEQ ID NO: 988 - protein, 449 aa, Homo sapiens; identical to SEQ ID NO: 559
  CARBOHYD 374: note = N is linked to the glycan structure Hex(6)HexNAc(5)Fuc(0)NeuAc(1)

SEQ ID NO: 989 - protein, 821 aa, Homo sapiens
  CARBOHYD 366: note = N is linked to the glycan structure Hex(6)HexNAc(5)Fuc(1)NeuAc(3)
  CARBOHYD 366: note = N is linked to the N-linked glycan structure Hex(6)HexNAc(5)Fuc(0)NeuAc(3)
MPTVISASVAPRTAAEPRSPGPVPHPAQSKATEAGGGNPSGIYSAIISRNFPIIGVKEKTFEQLHKKCLEKKVLYVDPEFPPDETSLFYSQKFPIQFVWKRPPEICENPRFIIDGANRTDICQGELGDCWFLAAIACLTLNQHLLFRVIPHDQSFIENYAGIFHFQFWRYGEWVDVVIDDCLPTYNNQLVFTKSNHRNEFWSALLEKAYAKLHGSYEALKGGNTTEAMEDFTGGVAEFFEIRDAPSDMYKIMKKAIERGSLMGCSIDDGTNMTYGTSPSGLNMGELIARMVRNMDNSLLQDSDLDPRGSDERPTRTIIPVQYETRMACGLVRGHAYSVTGLDEVPFKGEKVKLVRLRNPWGQVEWNGSWSDRWKDWSFVDKDEKARLQHQVTEDGEFWMSYEDFIYHFTKLEICNLTADALQSDKLQTWTVSVNEGRWVRGCSAGGCRNFPDTFWTNPQYRLKLLEEDDDPDDSEVICSFLVALMQKNRRKDRKLGASLFTIGFAIYEVPKEMHGNKQHLQKDFFLYNASKARSKTYINMREVSQRFRLPPSEYVIVPSTYEPHQEGEFILRVFSEKRNLSEEVENTISVDRPVKKKKTKPIIFVSDRANSNKELGVDQESEEGKGKTSPDKQKQSPQPQPGSSDQESEEQQQFRNIFKQIAGDDMEICADELKKVLNTVVNKHKDLKTHGFTLESCRSMIALMDTDGSGKLNLQEFHHLWNKIKAWQKIFKHYDTDQSGTINSYEMRNAVNDAGFHLNNQLYDIITMRYADKHMNIDFDSFICCFVRLEGMFRAFHAFDKDGDGIIKLNVLEWLQLTMYA

SEQ ID NO: 990 - protein, 355 aa, Homo sapiens [sequence omitted]

SEQ ID NO: 991 - protein, 599 aa, Homo sapiens; identical to SEQ ID NO: 447
  CARBOHYD 33: note = N is linked to the N-linked glycan structure Hex(5)HexNAc(4)Fuc(0)NeuAc(2)

SEQ ID NO: 992 - protein, 119 aa, Homo sapiens; identical to SEQ ID NO: 147

SEQ ID NO: 993 - protein, 330 aa, Homo sapiens; identical to SEQ ID NO: 44
  CARBOHYD 126: note = N is linked to the N-linked glycan structure Hex(5)HexNAc(4)Fuc(0)NeuAc(2)

SEQ ID NO: 994 - protein, 930 aa, Homo sapiens; identical to SEQ ID NO: 567
  CARBOHYD 517: note = N is linked to the N-linked glycan structure Hex(5)HexNAc(4)Fuc(0)NeuAc(1)

SEQ ID NO: 995 - protein, 1703 aa, Homo sapiens
  CARBOHYD 1005: note = N is linked to the glycan structure Hex(7)HexNAc(5)Fuc(1)NeuAc(2)
  CARBOHYD 1005: note = N is linked to the glycan structure Hex(5)HexNAc(4)Fuc(3)NeuAc(1)
  CARBOHYD 1005: note = N is linked to the glycan structure Hex(7)HexNAc(4)Fuc(2)NeuAc(0)
MSLLCVGVKKAKFDGAQEKFNTYVTLKVQNVKSTTIAVRGSQPSWEQDFMFEINRLDLGLTVEVWNKGLIWDTMVGTVWIPLRTIRQSNEEGPGEWLTLDSQVIMADSEICGTKDPTFHRILLDTRFELPLDIPEEEARYWAKKLEQLNAMRDQDEYSFQDEQDKPLPVPSNQCCNWNYFGWGEQHNDDPDSAVDDRDSDYRSETSNSIPPPYYTTSQPNASVHQYSVRPPPLGSRESYSDSMHSYEEFSEPQALSPTGSSRYASSGELSQGSSQLSEDFDPDEHSLQGSDMEDERDRDSYHSCHSSVSYHKDSPRWDQDEEELEEDLEDFLEEEELPEDEEELEEEEEEVPDDLGSYAQREDVAVAEPKDFKRISLPPAAPGKEDKAPVAPTEAPDMAKVAPKPATPDKVPAAEQIPEAEPPKDEESFRPREDEEGQEGQDSMSRAKANWLRAFNKVRMQLQEARGEGEMSKSLWFKGGPGGGLIIIDSMPDIRKRKPIPLVSDLAMSLVQSRKAGITSALASSTLNNEELKNHVYKKTLQALIYPISCTTPHNFEVWTATTPTYCYECEGLLWGIARQGMRCTECGVKCHEKCQDLLNADCLQRAAEKSSKHGAEDRTQNIIMVLKDRMKIRERNKPEIFELIQEIFAVTKTAHTQQMKAVKQSVLDGTSKWSAKISITVVCAQGLQAKDKTGSSDPYVTVQVGKTKKRTKTIYGNLNPVWEENFHFECHNSSDRIKVRVWDEDDDIKSRVKQRFKRESDDFLGQTIIEVRTLSGEMDVWYNLDKRTDKSAVSGAIRLHISVEIKGEEKVAPYHVQYTCLHENLFHFVTDVQNNGVVKIPDAKGDDAWKVYYDETAQEIVDEFAMRYGVESIYQAMTHFACLSSKYMCPGVPAVMSTLLANINAYYAHTTASTNVSASDRFAASNFGKERFVKLLDQLHNSLRIDLSMYRNNFPASSPERLQDLKSTVDLLTSITFFRMKVQELQSPPRASQVVKDCVKACLNSTYEYIFNNCHELYSREYQTDPAKKGEVLPEEQGPSIKNLDFWSKLITLIVSIIEEDKNSYTPCLNQFPQELNVGKISAEVMWNLFAQDMKYAMEEHDKHRLCKSADYMNLHFKVKWLYNEYVTELPAFKDRVPEYPAWFEPFVIQWLDENEEVSRDFLHGALERDKKDGFQQTSEHALFSCSVVDVFSQLNQSFEIIKKLECPDPQIVGHYMRRFAKTISNVLLQYADIISKDFASYCSKEKEKVPCILMNNTQQLRVQLEKMFEAMGGKELDAEASDILKELQVKLNNVLDELSRVFATSFQPHIEECVKQMGDILSQVKGTGNVPASACSSVAQDADNVLQPIMDLLDSNLTLFAKICEKTVLKRVLKELWKLVMNTMEKTIVLPPLTDQTMIGNLLRKHGKGLEKGRVKLPSHSDGTQMIFNAAKELGQLSKLKDHMVREEAKSLTPKQCAVVELALDTIKQYFHAGGVGLKKTFLEKSPDLQSLRYALSLYTQATDLLIKTFVQTQSAQGLGVEDPVGEVSVHVELFTHPGTGEHKVTVKVVAANDLKWQTSGIFRPFIEVNIIGPQLSDKKRKFATKSKNNSWAPKYNESFQFTLSADAGPECYELQVCVKDYCFAREDRTVGLAVLQLRELAQRGSAACWLPLGRRIHMDDTGLTVLRILSQRSNDEVAKEFVKLKSDTRSAEEGGAAPAP

SEQ ID NO: 996 - protein, 201 aa, Homo sapiens; identical to SEQ ID NO: 28
  CARBOHYD 72: note = N is linked to the glycan structure Hex(7)HexNAc(6)Fuc(1)NeuAc(4)

SEQ ID NO: 997 - protein, 418 aa, synthetic construct; identical to SEQ ID NO: 24

SEQ ID NO: 998 - protein, 201 aa, synthetic construct; identical to SEQ ID NO: 418

SEQ ID NO: 999 - protein, 201 aa, synthetic construct; identical to SEQ ID NO: 28

SEQ ID NO: 1000 - protein, 189 aa, synthetic construct; identical to SEQ ID NO: 43

SEQ ID NO: 1001 - protein, 698 aa, synthetic construct; identical to SEQ ID NO: 159

SEQ ID NO: 1002 - protein, 16 aa, synthetic construct
  CARBOHYD 4: note = N is linked to the N-linked glycan structure Hex(5)HexNAc(4)Fuc(0)NeuAc(1)
YLGNATAIFFLPDEGK

SEQ ID NO: 1003 - protein, 16 aa, synthetic construct
  CARBOHYD 4: note = N is linked to the N-linked glycan structure Hex(5)HexNAc(4)Fuc(0)NeuAc(2)
YLGNATAIFFLPDEGK

SEQ ID NO: 1004 - protein, 15 aa, synthetic construct
YVGGQEHFAHLLILR

SEQ ID NO: 1005 - protein, 15 aa, synthetic construct
  CARBOHYD 7: note = N is linked to the glycan structure Hex(7)HexNAc(6)Fuc(1)Neu(5)Ac(2)
QDQCIYNTTYLNVQR

SEQ ID NO: 1006 - protein, 8 aa, synthetic construct
TEDTIFLR

SEQ ID NO: 1007 - protein, 22 aa, synthetic construct
  CARBOHYD 16: note = N is linked to the N-linked glycan structure Hex(5)HexNAc(4)Fuc(1)NeuAc(2)
ADGTVNQIEGEATPVNLTEPAK

SEQ ID NO: 1008 - protein, 21 aa, synthetic construct
  CARBOHYD 9: note = N is linked to the N-linked glycan structure Hex(5)HexNAc(4)Fuc(0)NeuAc(1)
QQQHLFGSNVTDCSGNFCLFR

SEQ ID NO: 1009 - protein, 122 aa, synthetic construct
QVQLVQSGVEVKKPGASVKVSCKASGYTFTNYYMYWVRQAPGQGLEWMGGINPSNGGTNFNEKFKNRVTLTTDSSTTTAYMELKSLQFDDTAVYYCARRDVHYRFDMGFDYWGQGTTVTVSS

SEQ ID NO: 1010 - protein, 111 aa, synthetic construct [sequence omitted]

SEQ ID NO: 1011 - protein, 447 aa, synthetic construct
QVQLVQSGVEVKKPGASVKVSCKASGYTFTNYYMYWVRQAPGQGLEWMGGINPSNGGTNENEKEKNRVTLTTDSSTTTAYMELKSLQFDDTAVYYCARRDYRFDMGFDYWGQGTTVTVSSASTKGPSVFPLAPCSRSTSESTAALGCLVKDYFPEPVTVSWNSGALTSGVHTFPAVLQSSGLYSLSSVVTVPSSSLGTKTYTCNVDHKPSNTKVDKRVESKYGPPCPPCPAPEFLGGPSVFLFPPKPKDTLMISRTPEVTCVVVDVSQEDPEVQFNWYVDGVEVHNAKTKPREEQFNSTYRVVSVLTVLHQDWLNGKEYKCKVSNKGLPSSIEKTISKAKGQPREPQVYTLPPSQEEMTKNQVSLTCLVKGFYPSDIAVEWESNGQPENNYKTTPPVLDSDGSFFLYSRLTVDKSRWQEGNVFSCSVMHEALHNHYTQKSLSLSLGK

SEQ ID NO: 1012 - protein, 218 aa, synthetic construct
EIVLTQSPATLSLSPGERATLSCRASKGVSTSGYSYLHWYQQKPGQAPRLLIYLASYLESGVPARFSGSGSGTDFTLTISSLEPEDFAVYYCQHSRDLPLTFGGGTKVEIKRTVAAPSVFIFPPSDEQLKSGTASVVCLLNNFYPREAKVQWKVDNALQSGNSQESVTEQDSKDSTYSLSSTLTLSKADYEKHKVYACEVTHQGLSSPVTKSFNRGEC

SEQ ID NO: 1013 - protein, 11 aa, synthetic construct
GWVTDGFSSLK

SEQ ID NO: 1014 - protein, 9 aa, synthetic construct
ILGGHLDAK

SEQ ID NO: 1015 - protein, 17 aa, synthetic construct
GVTSVSQIFHSPDLAIR

SEQ ID NO: 1016 - protein, 11 aa, synthetic construct
  CARBOHYD 3: note = N is linked to the N-linked glycan structure Hex(6)HexNAc(3)Fuc(1)NeuAc(1)
YKNNSDISSTR

SEQ ID NO: 1017 - protein, 20 aa, synthetic construct
  CARBOHYD 12: note = T is linked to the O-linked glycan structure Hex(1)HexNAc(1)Fuc(0)NeuAc(2)
TFVLSALQPSPTHSSSNTQR

SEQ ID NO: 1018 - protein, 10 aa, synthetic construct
ADLSGITGAR

SEQ ID NO: 1019 - protein, 11 aa, synthetic construct
IGESIELTCPK

SEQ ID NO: 1020 - protein, 8 aa, synthetic construct
GIYGTISR

SEQ ID NO: 1021 - protein, 7 aa, synthetic construct
ECDMHYK

SEQ ID NO: 1022 - protein, 12 aa, synthetic construct
LDLGLTVEVWNK
